(19) United States
(12) Patent Application Publication
(10) Pub. No.: US 2025/0388902 A1
(43) Pub. Date: Dec. 25, 2025

(54) ANTISENSE OLIGOMERS FOR TREATMENT OF NON-SENSE MEDIATED RNA DECAY BASED CONDITIONS AND DISEASES

(71) Applicant: Stoke Therapeutics, Inc., Bedford, MA (US)

(72) Inventors: Isabel Aznarez, Boston, MA (US); Jacob Kach, Boston, MA (US); Pavitra Ramachandran, Winchester, MA (US); Ana Corrionero Saiz, Cambridge, MA (US)

(21) Appl. No.: 19/187,338

(22) Filed: Apr. 23, 2025

Related U.S. Application Data
(63) Continuation of application No. PCT/US2023/036297, filed on Oct. 30, 2023.
(60) Provisional application No. 63/381,640, filed on Oct. 31, 2022.

(51) Int. Cl. C12N 15/113

(52) U.S. Cl. CPC C12N 15/113; C12N 2310/14; C12N 2310/313; C12N 2310/321; C12N 2320/33

(57) ABSTRACT

Alternative splicing events in genes can lead to non-productive mRNA transcripts which in turn can lead to aberrant or reduced protein expression, and therapeutic agents which can target the alternative splicing events in the genes can modulate the expression level of functional proteins in patients and/or inhibit aberrant protein expression. Such therapeutic agents can be used to treat a condition or disease caused by protein deficiency.

### CROSS-REFERENCE

[0001] This application is a continuation of International Application No. PCT/US2023/036297, filed Oct. 30, 2023, which claims the benefit of U.S. Provisional Application No. 63/381,640, filed Oct. 31, 2022, each of which is incorporated herein by reference in its entirety.

### SEQUENCE LISTING

[0002] The instant application contained a Sequence Listing which has been submitted electronically in XML format and is hereby incorporated by reference in its entirety. Said XML copy, created on Apr. 23, 2025, is named 47991_737_301_SL.xml and is 1,936,504 bytes in size.

### BACKGROUND

[0003] Alternative splicing events in genes can lead to non-productive mRNA transcripts which in turn can lead to aberrant protein expression, and therapeutic agents which can target the alternative splicing events in genes can modulate the expression level of functional proteins in patients and/or inhibit aberrant protein expression. Such therapeutic agents can be used to treat a condition or disease caused by protein deficiency.

### SUMMARY

[0004] Provided herein, in some aspects, is a method of modulating expression of a target protein in a cell comprising a pre-mRNA that is transcribed from a target gene and that encodes the target protein, the pre-mRNA comprising an alternatively-spliced coding exon (ASCE), wherein an alternative processed mRNA that is produced by splicing out of the ASCE during processing of the pre-mRNA undergoes non-sense mediated RNA decay, the method comprising contacting a therapeutic agent or a vector encoding the therapeutic agent to the cell, wherein the therapeutic agent promotes inclusion of the ASCE during the processing of the pre-mRNA, thereby increasing a level of a processed mRNA that is processed from the pre-mRNA and comprises the ASCE.

[0005] Provided herein, in some aspects, is a method of treating or reducing the likelihood of developing a disease or condition in a subject in need thereof by modulating expression of a target protein in a cell of the subject, the method comprising: contacting the cell of the subject with a therapeutic agent or a vector encoding the therapeutic agent, wherein the cell comprises a pre-mRNA that is transcribed from a target gene and that encodes the target protein, the pre-mRNA comprising an alternatively-spliced coding exon (ASCE), wherein an alternative processed mRNA that is produced by splicing out of the ASCE during processing of the pre-mRNA undergoes non-sense mediated RNA decay, wherein the therapeutic agent promotes inclusion of the ASCE during the processing of the pre-mRNA, thereby increasing a level of a processed mRNA that is processed from the pre-mRNA and comprises the ASCE.

[0006] In some embodiments, the expression of the target protein is increased in the cell.

[0007] In some embodiments, the target gene is selected from the group consisting of: PKD1, ABCA4, FUS, CEL, and NSD1.

[0008] In some embodiments, the target protein is selected from the group consisting of: polycystin-1, ATP binding cassette subfamily A member 4, FUS RNA binding protein, carboxyl ester lipase, and nuclear receptor binding SET domain protein 1.

[0009] In some embodiments, the therapeutic agent
[0010] (a) binds to a targeted portion of the mRNA encoding the target protein;
[0011] (b) modulates binding of a factor involved in splicing of the ASCE; or
[0012] (c) a combination of (a) and (b).

[0013] In some embodiments, the therapeutic agent interferes with binding of the factor involved in splicing of the ASCE to a region of the targeted portion.

[0014] In some embodiments, the targeted portion is proximal to the ASCE.

[0015] In some embodiments, the targeted portion is at most about 1500 nucleotides, about 1000 nucleotides, about 800 nucleotides, about 700 nucleotides, about 600 nucleotides, about 500 nucleotides, about 400 nucleotides, about 300 nucleotides, about 200 nucleotides, about 100 nucleotides, about 80 nucleotides, about 70 nucleotides, about 60 nucleotides, about 50 nucleotides upstream of 5′ end of the ASCE.

[0016] In some embodiments, the targeted portion is at least about 1500 nucleotides, about 1000 nucleotides, about 800 nucleotides, about 700 nucleotides, about 600 nucleotides, about 500 nucleotides, about 400 nucleotides, about 300 nucleotides, about 200 nucleotides, about 100 nucleotides, about 80 nucleotides, about 70 nucleotides, about 60 nucleotides, about 50 nucleotides, about 40 nucleotides, about 30 nucleotides, about 20 nucleotides, about 10 nucleotides, about 5 nucleotides, about 4 nucleotides, about 2 nucleotides, about 1 nucleotides upstream of 5′ end of the ASCE.

[0017] In some embodiments, the targeted portion is at most about 1500 nucleotides, about 1000 nucleotides, about 800 nucleotides, about 700 nucleotides, about 600 nucleotides, about 500 nucleotides, about 400 nucleotides, about 300 nucleotides, about 200 nucleotides, about 100 nucleotides, about 80 nucleotides, about 70 nucleotides, about 60 nucleotides, about 50 nucleotides downstream of 3′ end of the ASCE.

[0018] In some embodiments, the targeted portion is at least about 1500 nucleotides, about 1000 nucleotides, about 800 nucleotides, about 700 nucleotides, about 600 nucleotides, about 500 nucleotides, about 400 nucleotides, about 300 nucleotides, about 200 nucleotides, about 100 nucleotides, about 80 nucleotides, about 70 nucleotides, about 60 nucleotides, about 50 nucleotides, about 40 nucleotides, about 30 nucleotides, about 20 nucleotides, about 10 nucleotides, about 5 nucleotides, about 4 nucleotides, about 2 nucleotides, about 1 nucleotides downstream of 3′ end of the ASCE.

[0019] In some embodiments, the targeted portion is at most about 1500 nucleotides, about 1000 nucleotides, about 800 nucleotides, about 700 nucleotides, about 600 nucleotides, about 500 nucleotides, about 400 nucleotides, about 300 nucleotides, about 200 nucleotides, about 100 nucleotides, about 80 nucleotides, about 70 nucleotides, about 60 nucleotides, about 50 nucleotides upstream of genomic site selected from the group consisting of: GRCh38/hg38: chr16 2092954; GRCh38/hg38: chr1 94111438; GRCh38/hg38: chr16 31186802; GRCh38/hg38: chr9 133066530; and GRCh38/hg38: chr5 177238237.

[0020] In some embodiments, the targeted portion is about 1500 nucleotides, about 1000 nucleotides, about 800 nucleotides, about 700 nucleotides, about 600 nucleotides, about 500 nucleotides, about 400 nucleotides, about 300 nucleotides, about 200 nucleotides, about 100 nucleotides, about 80 nucleotides, about 70 nucleotides, about 60 nucleotides, about 50 nucleotides upstream of genomic site selected from the group consisting of: GRCh38/hg38: chr16 2092954; GRCh38/hg38: chr1 94111438; GRCh38/hg38: chr16 31186802; GRCh38/hg38: chr9 133066530; and GRCh38/hg38: chr5 177238237.

[0021] In some embodiments, the targeted portion is at most about 1500 nucleotides, about 1000 nucleotides, about 800 nucleotides, about 700 nucleotides, about 600 nucleotides, about 500 nucleotides, about 400 nucleotides, about 300 nucleotides, about 200 nucleotides, about 100 nucleotides, about 80 nucleotides, about 70 nucleotides, about 60 nucleotides, about 50 nucleotides downstream of genomic site selected from the group consisting of: GRCh38/hg38: chr16 2093093; GRCh38/hg38: chr1 94111579; GRCh38/hg38: chr16 31186836; GRCh38/hg38: chr9 133066660; and GRCh38/hg38: chr5 177238507.

[0022] In some embodiments, the targeted portion is about 1500 nucleotides, about 1000 nucleotides, about 800 nucleotides, about 700 nucleotides, about 600 nucleotides, about 500 nucleotides, about 400 nucleotides, about 300 nucleotides, about 200 nucleotides, about 100 nucleotides, about 80 nucleotides, about 70 nucleotides, about 60 nucleotides, about 50 nucleotides downstream of genomic site selected from the group consisting of: GRCh38/hg38: chr16 2093093; GRCh38/hg38: chr1 94111579; GRCh38/hg38: chr16 31186836; GRCh38/hg38: chr9 133066660; and GRCh38/hg38: chr5 177238507.

[0023] In some embodiments, the targeted portion is located in an intronic region between the ASCE and a canonical exonic region upstream of the ASCE of the mRNA encoding the target protein.

[0024] In some embodiments, the targeted portion is located in an intronic region between the ASCE and a canonical exonic region downstream of the ASCE of the mRNA encoding the target protein.

[0025] In some embodiments, the targeted portion at least partially overlaps with the ASCE.

[0026] In some embodiments, the targeted portion at least partially overlaps with an intron upstream or downstream of the ASCE.

[0027] In some embodiments, the targeted portion does not comprise a 5′ exon-intron junction or a 3′ exon-intron junction.

[0028] In some embodiments, the targeted portion is within the ASCE.

[0029] In some embodiments, the targeted portion comprises about 5, 6, 7, 8, 9, 10, 11, 12, 13, 14, 15, 16, 17, 18, 19, 20, 21, 22, 23, 24, 25, 26, 27, 28, 29, 30, or more consecutive nucleotides of the ASCE.

[0030] In some embodiments, the mRNA encoding the target protein comprises a sequence with at least about 80%, 85%, 90%, 95%, 97%, or 100% sequence identity to a sequence selected from the group consisting of SEQ ID NOS: 6-10.

[0031] In some embodiments, the mRNA encoding the target protein is encoded by a genetic sequence with at least about 80%, 85%, 90%, 95%, 97%, or 100% sequence identity to a sequence selected from the group consisting of SEQ ID NOS: 1-5.

[0032] In some embodiments, the targeted portion of the mRNA comprises a sequence with at least 80%, 85%, 90%, 95%, 97%, or 100% sequence identity to a region comprising at least 8 contiguous nucleic acids of a sequence selected from the group consisting of SEQ ID NOS: 6-10.

[0033] In some embodiments, the targeted portion of the mRNA is within the ASCE selected from the group consisting of: GRCh38/hg38: chr16 2092954 2093093; GRCh38/hg38: chr1 94111438 94111579; GRCh38/hg38: chr16 31186802 31186836; GRCh38/hg38: chr9 133066530 133066660; and GRCh38/hg38: chr5 177238237 177238507.

[0034] In some embodiments, the targeted portion of the mRNA is upstream or downstream of the ASCE selected from the group consisting of: GRCh38/hg38: chr16 2092954 2093093; GRCh38/hg38: chr1 94111438 94111579; GRCh38/hg38: chr16 31186802 31186836; GRCh38/hg38: chr9 133066530 133066660; and GRCh38/hg38: chr5 177238237 177238507.

[0035] In some embodiments, the targeted portion of the mRNA does not comprise an exon-intron junction of an ASCE selected from the group consisting of: GRCh38/hg38: chr16 2092954 2093093; GRCh38/hg38: chr1 94111438 94111579; GRCh38/hg38: chr16 31186802 31186836; GRCh38/hg38: chr9 133066530 133066660; and GRCh38/hg38: chr5 177238237 177238507.

[0036] In some embodiments, the target protein produced is a full-length protein or a wild-type protein.

[0037] In some embodiments, inclusion of the ASCE during the processing of the pre-mRNA in the cell contacted with the therapeutic agent or the vector encoding the therapeutic agent is increased by about 1.1 to about 10-fold, about 1.5 to about 10-fold, about 2 to about 10-fold, about 3 to about 10-fold, about 4 to about 10-fold, about 1.1 to about 5-fold, about 1.1 to about 6-fold, about 1.1 to about 7-fold, about 1.1 to about 8-fold, about 1.1 to about 9-fold, about 2 to about 5-fold, about 2 to about 6-fold, about 2 to about 7-fold, about 2 to about 8-fold, about 2 to about 9-fold, about 3 to about 6-fold, about 3 to about 7-fold, about 3 to about 8-fold, about 3 to about 9-fold, about 4 to about 7-fold, about 4 to about 8-fold, about 4 to about 9-fold, at least about 1.1-fold, at least about 1.5-fold, at least about 2-fold, at least about 2.5-fold, at least about 3-fold, at least about 3.5-fold, at least about 4-fold, at least about 5-fold, or at least about 10-fold, compared to inclusion of the ASCE during the processing of the pre-mRNA in a corresponding cell that is not contacted with the therapeutic agent or the vector encoding the therapeutic agent.

[0038] In some embodiments, the level of the processed mRNA produced in the cell contacted with the therapeutic agent or the vector encoding the therapeutic agent is increased by about 1.1 to about 10-fold, about 1.5 to about 10-fold, about 2 to about 10-fold, about 3 to about 10-fold, about 4 to about 10-fold, about 1.1 to about 5-fold, about 1.1 to about 6-fold, about 1.1 to about 7-fold, about 1.1 to about 8-fold, about 1.1 to about 9-fold, about 2 to about 5-fold, about 2 to about 6-fold, about 2 to about 7-fold, about 2 to about 8-fold, about 2 to about 9-fold, about 3 to about 6-fold, about 3 to about 7-fold, about 3 to about 8-fold, about 3 to about 9-fold, about 4 to about 7-fold, about 4 to about 8-fold, about 4 to about 9-fold, at least about 1.1-fold, at least about 1.5-fold, at least about 2-fold, at least about 2.5-fold, at least about 3-fold, at least about 3.5-fold, at least about 4-fold, at least about 5-fold, or at least about 10-fold, compared to a level of the processed mRNA in a corresponding cell that is not contacted with the therapeutic agent or the vector encoding the therapeutic agent.

[0039] In some embodiments, a level of the target protein produced in the cell contacted with the therapeutic agent is increased by about 1.1 to about 10-fold, about 1.5 to about 10-fold, about 2 to about 10-fold, about 3 to about 10-fold, about 4 to about 10-fold, about 1.1 to about 5-fold, about 1.1 to about 6-fold, about 1.1 to about 7-fold, about 1.1 to about 8-fold, about 1.1 to about 9-fold, about 2 to about 5-fold, about 2 to about 6-fold, about 2 to about 7-fold, about 2 to about 8-fold, about 2 to about 9-fold, about 3 to about 6-fold, about 3 to about 7-fold, about 3 to about 8-fold, about 3 to about 9-fold, about 4 to about 7-fold, about 4 to about 8-fold, about 4 to about 9-fold, at least about 1.1-fold, at least about 1.5-fold, at least about 2-fold, at least about 2.5-fold, at least about 3-fold, at least about 3.5-fold, at least about 4-fold, at least about 5-fold, or at least about 10-fold, compared to a level of the target protein produced in a corresponding cell that is not contacted with the therapeutic agent or the vector encoding the therapeutic agent.

[0040] In some embodiments, exclusion of the ASCE during the processing of the pre-mRNA in the cell contacted with the therapeutic agent is decreased by about 1.1 to about 10-fold, about 1.5 to about 10-fold, about 2 to about 10-fold, about 3 to about 10-fold, about 4 to about 10-fold, about 1.1 to about 5-fold, about 1.1 to about 6-fold, about 1.1 to about 7-fold, about 1.1 to about 8-fold, about 1.1 to about 9-fold, about 2 to about 5-fold, about 2 to about 6-fold, about 2 to about 7-fold, about 2 to about 8-fold, about 2 to about 9-fold, about 3 to about 6-fold, about 3 to about 7-fold, about 3 to about 8-fold, about 3 to about 9-fold, about 4 to about 7-fold, about 4 to about 8-fold, about 4 to about 9-fold, at least about 1.1-fold, at least about 1.5-fold, at least about 2-fold, at least about 2.5-fold, at least about 3-fold, at least about 3.5-fold, at least about 4-fold, at least about 5-fold, or at least about 10-fold, compared to exclusion of the ASCE during the processing of the pre-mRNA in a corresponding cell that is not contacted with the therapeutic agent or the vector encoding the therapeutic agent.

[0041] In some embodiments, the target protein is NSD1, and the method causes a modification of a histone protein in the cell.

[0042] In some embodiments, the histone protein is Histone H3.

[0043] In some embodiments, the modification comprises acetylation, methylation, phosphorylation, or ubiquitination.

[0044] In some embodiments, the modification is methylation.

[0045] In some embodiments, the methylation of the histone protein is increased in the cell.

[0046] In some embodiments, the methylation of the histone protein in the cell contacted with the therapeutic agent or the vector encoding the therapeutic agent is increased by about 1.1 to about 10-fold, about 1.5 to about 10-fold, about 2 to about 10-fold, about 3 to about 10-fold, about 4 to about 10-fold, about 1.1 to about 5-fold, about 1.1 to about 6-fold, about 1.1 to about 7-fold, about 1.1 to about 8-fold, about 1.1 to about 9-fold, about 2 to about 5-fold, about 2 to about 6-fold, about 2 to about 7-fold, about 2 to about 8-fold, about 2 to about 9-fold, about 3 to about 6-fold, about 3 to about 7-fold, about 3 to about 8-fold, about 3 to about 9-fold, about 4 to about 7-fold, about 4 to about 8-fold, about 4 to about 9-fold, at least about 1.1-fold, at least about 1.5-fold, at least about 2-fold, at least about 2.5-fold, at least about 3-fold, at least about 3.5-fold, at least about 4-fold, at least about 5-fold, or at least about 10-fold, compared to the methylation of the histone protein in a corresponding cell that is not contacted with the therapeutic agent or the vector encoding the therapeutic agent.

[0047] In some embodiments, the method further comprises assessing mRNA level or expression level of the target protein.

[0048] In some embodiments, the disease or condition is induced by a loss-of-function mutation in the target gene.

[0049] In some embodiments, the disease or condition is associated with haploinsufficiency of a gene encoding the target protein, and the subject has a first allele encoding a functional target protein, and a second allele from which the target protein is not produced or produced at a reduced level, or a second allele encoding a nonfunctional target protein or a partially functional target protein.

[0050] In some embodiments, the disease or condition is selected from the group consisting of: Polycystic Kidney Disease 1 with or without Polycystic Liver Disease; Autosomal Dominant Polycystic Kidney Disease; Age-related macular degeneration-2; Stargardt Disease 1; Amyotrophic Lateral Sclerosis; Amyotrophic Lateral Sclerosis 6 with or without Frontotemporal Dementia; Tremor, Hereditary Essential, 4; Frontotemporal Dementia; Maturity-Onset Diabetes Of The Young, Type 8, with Exocrine Dysfunction; Maturity-Onset Diabetes Of The Young; Sotos Syndrome 1; and Beckwith-Wiedemann Syndrome.

[0051] In some embodiments, the disease or condition is associated with an autosomal recessive mutation of a gene encoding the target protein, wherein the subject has a first allele encoding from which: (i) the target protein is not produced or produced at a reduced level compared to a wild-type allele; or (ii) the target protein produced is nonfunctional or partially functional compared to a wild-type allele, and a second allele from which: (iii) the target protein is produced at a reduced level compared to a wild-type allele and the target protein produced is at least partially functional compared to a wild-type allele; or (iv) the target protein produced is partially functional compared to a wild-type allele.

[0052] In some embodiments, the disease or condition is induced by a gain-of-function mutation in the target protein.

[0053] In some embodiments, the subject has an allele from which the target protein is produced at an increased level, or an allele encoding a mutant target protein that exhibits increased activity in the cell.

[0054] In some embodiments, the subject is a human.

[0055] In some embodiments, the subject is a non-human animal.

[0056] In some embodiments, the subject is a fetus, an embryo, or a child.

[0057] In some embodiments, the cell or the cells is ex vivo, or in a tissue, or organ ex vivo.

[0058] In some embodiments, the therapeutic agent is administered by intrathecal injection, intracerebroventricular injection, intraperitoneal injection, intramuscular injection, subcutaneous injection, intravitreal, or intravenous injection of the subject.

[0059] In some embodiments, the method further comprises administering a second therapeutic agent to the subject.

[0060] In some embodiments, the second therapeutic agent is a small molecule.

[0061] In some embodiments, the second therapeutic agent is an antisense oligomer.

[0062] In some embodiments, the second therapeutic agent corrects intron retention.

[0063] In some embodiments, the disease or condition is a disease or condition associated with a deficiency in amount or activity of the target protein.

[0064] In some embodiments, the disease or condition is a disease or condition associated with a deficiency in amount or activity of a protein that the target protein functionally augments, compensates for, replaces or functionally interacts with.

[0065] In some embodiments, the disease or the condition is caused by a deficient amount or activity of the target protein.

[0066] In some embodiments, the method further comprises assessing the subject's genome for at least one genetic mutation associated with the disease.

[0067] In some embodiments, at least one genetic mutation is within a locus of a gene associated with the disease.

[0068] In some embodiments, at least one genetic mutation is within a locus associated with expression of a gene associated with the disease.

[0069] In some embodiments, at least one genetic mutation is within the locus of the gene encoding the target protein.

[0070] In some embodiments, at least one genetic mutation is within a locus associated with expression of the gene encoding the target protein.

[0071] In some embodiments, the method treats the disease or condition.

[0072] In some embodiments, the target protein is the canonical isoform of the protein.

[0073] In some embodiments, the alternative processed mRNA that is produced by splicing out of the ASCE comprises a premature termination codon (PTC).

[0074] In some embodiments, the agent is an antisense oligomer (ASO).

[0075] In some embodiments, the ASO is at least 80%, at least 85%, at least 90%, at least 95%, at least 98%, at least 99%, or 100%, complementary to the targeted portion of the mRNA.

[0076] In some embodiments, the ASO comprises a sequence that is at least about 80%, 85%, 90%, 95%, 97%, or 100% complementary to at least 8 contiguous nucleic acids of a sequence selected from the group consisting of SEQ ID NOS: 6-10.

[0077] In some embodiments, the ASO comprises a backbone modification comprising a phosphorothioate linkage or a phosphorodiamidate linkage.

[0078] In some embodiments, the ASO comprises a phosphorodiamidate morpholino, a locked nucleic acid, a peptide nucleic acid, a 2′-O-methyl, a 2′-Fluoro, or a 2′-O-methoxyethyl moiety.

[0079] In some embodiments, the ASO comprises at least one modified sugar moiety.

[0080] In some embodiments, each sugar moiety is a modified sugar moiety.

[0081] In some embodiments, the ASO consists of from 8 to 50 nucleobases, 8 to 40 nucleobases, 8 to 35 nucleobases, 8 to 30 nucleobases, 8 to 25 nucleobases, 8 to 20 nucleobases, 8 to 15 nucleobases, 9 to 50 nucleobases, 9 to 40 nucleobases, 9 to 35 nucleobases, 9 to 30 nucleobases, 9 to 25 nucleobases, 9 to 20 nucleobases, 9 to 15 nucleobases, 10 to 50 nucleobases, 10 to 40 nucleobases, 10 to 35 nucleobases, 10 to 30 nucleobases, 10 to 25 nucleobases, 10 to 20 nucleobases, 10 to 15 nucleobases, 11 to 50 nucleobases, 11 to 40 nucleobases, 11 to 35 nucleobases, 11 to 30 nucleobases, 11 to 25 nucleobases, 11 to 20 nucleobases, 11 to 15 nucleobases, 12 to 50 nucleobases, 12 to 40 nucleobases, 12 to 35 nucleobases, 12 to 30 nucleobases, 12 to 25 nucleobases, 12 to 20 nucleobases, or 12 to 15 nucleobases.

[0082] In some embodiments, the target gene is NSD1, and the ASO comprises a sequence with at least about 80%, 85%, 90%, 95%, 97%, or 100% sequence identity to any one of SEQ ID NOS: 16-1748.

[0083] In some embodiments, the target gene is NSD1, and the vector encoding the agent encodes a polynucleotide comprising a sequence with at least about 80%, 85%, 90%, 95%, 97%, or 100% sequence identity to any one of the ASO sequences listed in Table 4, Table 5A, Table 5A-1, Table 5B, Table 5B-1, Table 5D, Table 5E, Table 5G, and Table 5G-1.

[0084] In some embodiments, the vector encoding the agent is a viral vector.

[0085] In some embodiments, the viral vector is an adenovirus-associated viral vector.

[0086] In some embodiments, the vector encoding the agent encodes a polynucleotide comprising an ASO sequence and an snRNA.

[0087] In some embodiments, the snRNA comprises a modified snRNA.

[0088] In some embodiments, the modified snRNA is a modified U1 snRNA or a modified U7 snRNA.

[0089] In some embodiments, the snRNA comprises a U1 snRNA.

[0090] In some embodiments, the target gene is NSD1, and the ASO sequence comprises a sequence with at least about 80%, 85%, 90%, 95%, 97%, or 100% sequence identity to any one of the ASO sequences listed in Table 4, Table 5A, Table 5B, Table 5D, Table 5E, and Table 5G.

[0091] In some embodiments, the snRNA comprises a U7 snRNA.

[0092] In some embodiments, the target gene is NSD1, and the ASO comprises a sequence with at least about 80%, 85%, 90%, 95%, 97%, or 100% sequence identity to any one of the ASO sequences listed in Table 4, Table 5A, Table 5A-1, Table 5B, Table 5B-1, Table 5G, and Table 5G-1.

[0093] Provided herein, in some aspects, is a composition comprising an agent or a vector encoding the agent, wherein the agent modulates splicing of a pre-mRNA in a cell that is transcribed from a target gene and that encodes the target protein, wherein the pre-mRNA comprises an alternatively-spliced coding exon (ASCE), wherein an alternative processed mRNA that is produced by splicing out of the ASCE during processing of the pre-mRNA undergoes non-sense mediated RNA decay, wherein the agent promotes inclusion of the ASCE during the processing of the pre-mRNA, thereby increasing a level of a processed mRNA that is processed from the pre-mRNA and comprises the ASCE.

[0094] In some embodiments, the agent increases expression of the target protein in the cell.

[0095] In some embodiments, the target gene is selected from the group consisting of: PKD1, ABCA4, FUS, CEL, and NSD1.

[0096] In some embodiments, the target protein is selected from the group consisting of: polycystin-1, ATP binding cassette subfamily A member 4, FUS RNA binding protein, carboxyl ester lipase, and nuclear receptor binding SET domain protein 1.

[0097] In some embodiments, the agent
[0098] (a) binds to a targeted portion of the mRNA encoding the target protein;
[0099] (b) modulates binding of a factor involved in splicing of the ASCE; or
[0100] (c) a combination of (a) and (b).

[0101] In some embodiments, the agent interferes with binding of the factor involved in splicing of the ASCE to a region of the targeted portion.

[0102] In some embodiments, the targeted portion is proximal to the ASCE.

[0103] In some embodiments, the targeted portion is at most about 1500 nucleotides, about 1000 nucleotides, about 800 nucleotides, about 700 nucleotides, about 600 nucleotides, about 500 nucleotides, about 400 nucleotides, about 300 nucleotides, about 200 nucleotides, about 100 nucleotides, about 80 nucleotides, about 70 nucleotides, about 60 nucleotides, about 50 nucleotides upstream of 5′ end of the ASCE.

[0104] In some embodiments, the targeted portion is at least about 1500 nucleotides, about 1000 nucleotides, about 800 nucleotides, about 700 nucleotides, about 600 nucleotides, about 500 nucleotides, about 400 nucleotides, about 300 nucleotides, about 200 nucleotides, about 100 nucleotides, about 80 nucleotides, about 70 nucleotides, about 60 nucleotides, about 50 nucleotides, about 40 nucleotides, about 30 nucleotides, about 20 nucleotides, about 10 nucleotides, about 5 nucleotides, about 4 nucleotides, about 2 nucleotides, about 1 nucleotide(s) upstream of 5′ end of the ASCE.

[0105] In some embodiments, the targeted portion is at most about 1500 nucleotides, about 1000 nucleotides, about 800 nucleotides, about 700 nucleotides, about 600 nucleotides, about 500 nucleotides, about 400 nucleotides, about 300 nucleotides, about 200 nucleotides, about 100 nucleotides, about 80 nucleotides, about 70 nucleotides, about 60 nucleotides, about 50 nucleotides downstream of 3′ end of the ASCE.

[0106] In some embodiments, the targeted portion is at least about 1500 nucleotides, about 1000 nucleotides, about 800 nucleotides, about 700 nucleotides, about 600 nucleotides, about 500 nucleotides, about 400 nucleotides, about 300 nucleotides, about 200 nucleotides, about 100 nucleotides, about 80 nucleotides, about 70 nucleotides, about 60 nucleotides, about 50 nucleotides, about 40 nucleotides, about 30 nucleotides, about 20 nucleotides, about 10 nucleotides, about 5 nucleotides, about 4 nucleotides, about 2 nucleotides, about 1 nucleotides downstream of 3′ end of the ASCE.

[0107] In some embodiments, the targeted portion is at most about 1500 nucleotides, about 1000 nucleotides, about 800 nucleotides, about 700 nucleotides, about 600 nucleotides, about 500 nucleotides, about 400 nucleotides, about 300 nucleotides, about 200 nucleotides, about 100 nucleotides, about 80 nucleotides, about 70 nucleotides, about 60 nucleotides, about 50 nucleotides upstream of genomic site selected from the group consisting of: GRCh38/hg38: chr16 2092954; GRCh38/hg38: chr1 94111438; GRCh38/hg38: chr16 31186802; GRCh38/hg38: chr9 133066530; and GRCh38/hg38: chr5 177238237.

[0108] In some embodiments, the targeted portion is about 1500 nucleotides, about 1000 nucleotides, about 800 nucleotides, about 700 nucleotides, about 600 nucleotides, about 500 nucleotides, about 400 nucleotides, about 300 nucleotides, about 200 nucleotides, about 100 nucleotides, about 80 nucleotides, about 70 nucleotides, about 60 nucleotides, about 50 nucleotides upstream of genomic site selected from the group consisting of: GRCh38/hg38: chr16 2092954; GRCh38/hg38: chr1 94111438; GRCh38/hg38: chr16 31186802; GRCh38/hg38: chr9 133066530; and GRCh38/hg38: chr5 177238237.

[0109] In some embodiments, the targeted portion is at most about 1500 nucleotides, about 1000 nucleotides, about 800 nucleotides, about 700 nucleotides, about 600 nucleotides, about 500 nucleotides, about 400 nucleotides, about 300 nucleotides, about 200 nucleotides, about 100 nucleotides, about 80 nucleotides, about 70 nucleotides, about 60 nucleotides, about 50 nucleotides downstream of genomic site selected from the group consisting of: GRCh38/hg38: chr16 2093093; GRCh38/hg38: chr1 94111579; GRCh38/hg38: chr16 31186836; GRCh38/hg38: chr9 133066660; and GRCh38/hg38: chr5 177238507.

[0110] In some embodiments, the targeted portion is about 1500 nucleotides, about 1000 nucleotides, about 800 nucleotides, about 700 nucleotides, about 600 nucleotides, about 500 nucleotides, about 400 nucleotides, about 300 nucleotides, about 200 nucleotides, about 100 nucleotides, about 80 nucleotides, about 70 nucleotides, about 60 nucleotides, about 50 nucleotides downstream of genomic site selected from the group consisting of: GRCh38/hg38: chr16 2093093; GRCh38/hg38: chr1 94111579; GRCh38/hg38: chr16 31186836; GRCh38/hg38: chr9 133066660; and GRCh38/hg38: chr5 177238507.

[0111] In some embodiments, the targeted portion is located in an intronic region between the ASCE and a canonical exonic region upstream of the ASCE of the mRNA encoding the target protein.

[0112] In some embodiments, the targeted portion is located in an intronic region between the ASCE and a canonical exonic region downstream of the ASCE of the mRNA encoding the target protein.

[0113] In some embodiments, the targeted portion at least partially overlaps with the ASCE.

[0114] In some embodiments, the targeted portion at least partially overlaps with an intron upstream or downstream of the ASCE.

[0115] In some embodiments, the targeted portion does not comprise a 5′ exon-intron junction or a 3′ exon-intron junction.

[0116] In some embodiments, the targeted portion is within the ASCE.

[0117] In some embodiments, the targeted portion comprises about 5, 6, 7, 8, 9, 10, 11, 12, 13, 14, 15, 16, 17, 18, 19, 20, 21, 22, 23, 24, 25, 26, 27, 28, 29, 30, or more consecutive nucleotides of the ASCE.

[0118] In some embodiments, the mRNA encoding the target protein comprises a sequence with at least about 80%, 85%, 90%, 95%, 97%, or 100% sequence identity to a sequence selected from the group consisting of SEQ ID NOS: 6-10.

[0119] In some embodiments, the mRNA encoding the target protein is encoded by a genetic sequence with at least about 80%, 85%, 90%, 95%, 97%, or 100% sequence identity to a sequence selected from the group consisting of SEQ ID NOS: 1-5.

[0120] In some embodiments, the targeted portion of the mRNA comprises a sequence with at least 80%, 85%, 90%, 95%, 97%, or 100% sequence identity to a region comprising at least 8 contiguous nucleic acids of a sequence selected from the group consisting of SEQ ID NOS: 6-10.

[0121] In some embodiments, the targeted portion of the mRNA is within the ASCE selected from the group consisting of: GRCh38/hg38: chr16 2092954 2093093; GRCh38/hg38: chr1 94111438 94111579; GRCh38/hg38: chr16 31186802 31186836; GRCh38/hg38: chr9 133066530 133066660; and GRCh38/hg38: chr5 177238237 177238507.

[0122] In some embodiments, the targeted portion of the mRNA is upstream or downstream of the ASCE selected from the group consisting of: GRCh38/hg38: chr16 2092954 2093093; GRCh38/hg38: chr1 94111438 94111579; GRCh38/hg38: chr16 31186802 31186836; GRCh38/hg38: chr9 133066530 133066660; and GRCh38/hg38: chr5 177238237 177238507.

[0123] In some embodiments, the targeted portion of the mRNA does not comprise an exon-intron junction of an ASCE selected from the group consisting of: GRCh38/hg38: chr16 2092954 2093093; GRCh38/hg38: chr1 94111438 94111579; GRCh38/hg38: chr16 31186802 31186836; GRCh38/hg38: chr9 133066530 133066660; and GRCh38/hg38: chr5 177238237 177238507.

[0124] In some embodiments, the target protein produced is a full-length protein or a wild-type protein.

[0125] In some embodiments, inclusion of the ASCE during the processing of the pre-mRNA in the cell contacted with the therapeutic agent or the vector encoding the therapeutic agent is increased by about 1.1 to about 10-fold, about 1.5 to about 10-fold, about 2 to about 10-fold, about 3 to about 10-fold, about 4 to about 10-fold, about 1.1 to about 5-fold, about 1.1 to about 6-fold, about 1.1 to about 7-fold, about 1.1 to about 8-fold, about 1.1 to about 9-fold, about 2 to about 5-fold, about 2 to about 6-fold, about 2 to about 7-fold, about 2 to about 8-fold, about 2 to about 9-fold, about 3 to about 6-fold, about 3 to about 7-fold, about 3 to about 8-fold, about 3 to about 9-fold, about 4 to about 7-fold, about 4 to about 8-fold, about 4 to about 9-fold, at least about 1.1-fold, at least about 1.5-fold, at least about 2-fold, at least about 2.5-fold, at least about 3-fold, at least about 3.5-fold, at least about 4-fold, at least about 5-fold, or at least about 10-fold, compared to inclusion of the ASCE during the processing of the pre-mRNA in a corresponding cell that is not contacted with the therapeutic agent or the vector encoding the therapeutic agent.

[0126] In some embodiments, the level of the processed mRNA produced in the cell contacted with the therapeutic agent or the vector encoding the therapeutic agent is increased by about 1.1 to about 10-fold, about 1.5 to about 10-fold, about 2 to about 10-fold, about 3 to about 10-fold, about 4 to about 10-fold, about 1.1 to about 5-fold, about 1.1 to about 6-fold, about 1.1 to about 7-fold, about 1.1 to about 8-fold, about 1.1 to about 9-fold, about 2 to about 5-fold, about 2 to about 6-fold, about 2 to about 7-fold, about 2 to about 8-fold, about 2 to about 9-fold, about 3 to about 6-fold, about 3 to about 7-fold, about 3 to about 8-fold, about 3 to about 9-fold, about 4 to about 7-fold, about 4 to about 8-fold, about 4 to about 9-fold, at least about 1.1-fold, at least about 1.5-fold, at least about 2-fold, at least about 2.5-fold, at least about 3-fold, at least about 3.5-fold, at least about 4-fold, at least about 5-fold, or at least about 10-fold, compared to a level of the processed mRNA in a corresponding cell that is not contacted with the therapeutic agent or the vector encoding the therapeutic agent.

[0127] In some embodiments, a level of the target protein produced in the cell contacted with the agent is increased by about 1.1 to about 10-fold, about 1.5 to about 10-fold, about 2 to about 10-fold, about 3 to about 10-fold, about 4 to about 10-fold, about 1.1 to about 5-fold, about 1.1 to about 6-fold, about 1.1 to about 7-fold, about 1.1 to about 8-fold, about 1.1 to about 9-fold, about 2 to about 5-fold, about 2 to about 6-fold, about 2 to about 7-fold, about 2 to about 8-fold, about 2 to about 9-fold, about 3 to about 6-fold, about 3 to about 7-fold, about 3 to about 8-fold, about 3 to about 9-fold, about 4 to about 7-fold, about 4 to about 8-fold, about 4 to about 9-fold, at least about 1.1-fold, at least about 1.5-fold, at least about 2-fold, at least about 2.5-fold, at least about 3-fold, at least about 3.5-fold, at least about 4-fold, at least about 5-fold, or at least about 10-fold, compared to a level of the target protein produced in a corresponding cell that is not contacted with the therapeutic agent or the vector encoding the therapeutic agent.

[0128] In some embodiments, exclusion of the ASCE during the processing of the pre-mRNA in the cell contacted with the therapeutic agent is decreased by about 1.1 to about 10-fold, about 1.5 to about 10-fold, about 2 to about 10-fold, about 3 to about 10-fold, about 4 to about 10-fold, about 1.1 to about 5-fold, about 1.1 to about 6-fold, about 1.1 to about 7-fold, about 1.1 to about 8-fold, about 1.1 to about 9-fold, about 2 to about 5-fold, about 2 to about 6-fold, about 2 to about 7-fold, about 2 to about 8-fold, about 2 to about 9-fold, about 3 to about 6-fold, about 3 to about 7-fold, about 3 to about 8-fold, about 3 to about 9-fold, about 4 to about 7-fold, about 4 to about 8-fold, about 4 to about 9-fold, at least about 1.1-fold, at least about 1.5-fold, at least about 2-fold, at least about 2.5-fold, at least about 3-fold, at least about 3.5-fold, at least about 4-fold, at least about 5-fold, or at least about 10-fold, compared to exclusion of the ASCE during the processing of the pre-mRNA in a corresponding cell that is not contacted with the therapeutic agent or the vector encoding the therapeutic agent.

[0129] In some embodiments, the target protein is NSD1, and the method causes a modification of a histone protein in the cell.

[0130] In some embodiments, the histone protein is Histone H3.

[0131] In some embodiments, the modification comprises acetylation, methylation, phosphorylation, or ubiquitination.

[0132] In some embodiments, the modification is methylation.

[0133] In some embodiments, the methylation of the histone protein is increased in the cell.

[0134] In some embodiments, the methylation of the histone protein in the cell contacted with the therapeutic agent or the vector encoding the therapeutic agent is increased by about 1.1 to about 10-fold, about 1.5 to about 10-fold, about 2 to about 10-fold, about 3 to about 10-fold, about 4 to about 10-fold, about 1.1 to about 5-fold, about 1.1 to about 6-fold, about 1.1 to about 7-fold, about 1.1 to about 8-fold, about 1.1 to about 9-fold, about 2 to about 5-fold, about 2 to about 6-fold, about 2 to about 7-fold, about 2 to about 8-fold, about 2 to about 9-fold, about 3 to about 6-fold, about 3 to about 7-fold, about 3 to about 8-fold, about 3 to about 9-fold, about 4 to about 7-fold, about 4 to about 8-fold, about 4 to about 9-fold, at least about 1.1-fold, at least about 1.5-fold, at least about 2-fold, at least about 2.5-fold, at least about 3-fold, at least about 3.5-fold, at least about 4-fold, at least about 5-fold, or at least about 10-fold, compared to the methylation of the histone protein in a corresponding cell that is not contacted with the therapeutic agent or the vector encoding the therapeutic agent.

[0135] In some embodiments, the target protein is the canonical isoform of the protein.

[0136] In some embodiments, the alternative processed mRNA that is produced by splicing out of the ASCE comprises a premature termination codon (PTC).

[0137] In some embodiments, the agent is an antisense oligomer (ASO).

[0138] In some embodiments, the ASO is at least 80%, at least 85%, at least 90%, at least 95%, at least 98%, at least 99%, or 100%, complementary to the targeted portion of the mRNA.

[0139] In some embodiments, the ASO comprises a sequence that is at least about 80%, 85%, 90%, 95%, 97%, or 100% complementary to at least 8 contiguous nucleic acids of a sequence selected from the group consisting of SEQ ID NOS: 6-10.

[0140] In some embodiments, the ASO comprises a backbone modification comprising a phosphorothioate linkage or a phosphorodiamidate linkage.

[0141] In some embodiments, the ASO comprises a phosphorodiamidate morpholino, a locked nucleic acid, a peptide nucleic acid, a 2′-O-methyl, a 2′-Fluoro, or a 2′-O-methoxyethyl moiety.

[0142] In some embodiments, the ASO comprises at least one modified sugar moiety.

[0143] In some embodiments, each sugar moiety is a modified sugar moiety.

[0144] In some embodiments, the ASO consists of from 8 to 50 nucleobases, 8 to 40 nucleobases, 8 to 35 nucleobases, 8 to 30 nucleobases, 8 to 25 nucleobases, 8 to 20 nucleobases, 8 to 15 nucleobases, 9 to 50 nucleobases, 9 to 40 nucleobases, 9 to 35 nucleobases, 9 to 30 nucleobases, 9 to 25 nucleobases, 9 to 20 nucleobases, 9 to 15 nucleobases, 10 to 50 nucleobases, 10 to 40 nucleobases, 10 to 35 nucleobases, 10 to 30 nucleobases, 10 to 25 nucleobases, 10 to 20 nucleobases, 10 to 15 nucleobases, 11 to 50 nucleobases, 11 to 40 nucleobases, 11 to 35 nucleobases, 11 to 30 nucleobases, 11 to 25 nucleobases, 11 to 20 nucleobases, 11 to 15 nucleobases, 12 to 50 nucleobases, 12 to 40 nucleobases, 12 to 35 nucleobases, 12 to 30 nucleobases, 12 to 25 nucleobases, 12 to 20 nucleobases, or 12 to 15 nucleobases.

[0145] In some embodiments, the ASO comprises a sequence with at least about 80%, 85%, 90%, 95%, 97%, or 100% sequence identity to any one of SEQ ID NOS: 16-1748.

[0146] In some embodiments, the target gene is NSD1, and the vector encoding the agent encodes a polynucleotide comprising a sequence with at least about 80%, 85%, 90%, 95%, 97%, or 100% sequence identity to any one of the ASO sequences listed in Table 4, Table 5A, Table 5A-1, Table 5B, Table 5B-1, Table 5D, Table 5E, Table 5G, and Table 5G-1.

[0147] In some embodiments, the vector encoding the agent is a viral vector.

[0148] In some embodiments, the viral vector is an adenovirus-associated viral vector.

[0149] In some embodiments, the vector encoding the agent encodes a polynucleotide comprising an ASO sequence and an snRNA.

[0150] In some embodiments, the snRNA comprises a modified snRNA.

[0151] In some embodiments, the modified snRNA is a modified U1 snRNA or a modified U7 snRNA.

[0152] In some embodiments, the snRNA comprises a U1 snRNA.

[0153] In some embodiments, the target gene is NSD1, and the ASO sequence comprises a sequence with at least about 80%, 85%, 90%, 95%, 97%, or 100% sequence identity to any one of the ASO sequences listed in Table 4, Table 5A, Table 5B, Table 5D, Table 5E, and Table 5G.

[0154] In some embodiments, the snRNA comprises a U7 snRNA.

[0155] In some embodiments, the target gene is NSD1, and the ASO comprises a sequence with at least about 80%, 85%, 90%, 95%, 97%, or 100% sequence identity to any one of the ASO sequences listed in Table 4, Table 5A, Table 5A-1, Table 5B, Table 5B-1, Table 5G, and Table 5G-1.

[0156] Provided herein, in some aspects, is a composition comprising an ASO that comprises a sequence with at least about 80%, 85%, 90%, 95%, 97%, or 100% sequence identity to any one of SEQ ID NOS: 16-1748.

[0157] In some embodiments, the ASO comprises a backbone modification comprising a phosphorothioate linkage or a phosphorodiamidate linkage.

[0158] In some embodiments, the ASO comprises a phosphorodiamidate morpholino, a locked nucleic acid, a peptide nucleic acid, a 2′-O-methyl, a 2′-Fluoro, or a 2′-O-methoxyethyl moiety.

[0159] In some embodiments, the ASO comprises at least one modified sugar moiety.

[0160] In some embodiments, each sugar moiety is a modified sugar moiety.

[0161] In some embodiments, the ASO consists of from 8 to 50 nucleobases, 8 to 40 nucleobases, 8 to 35 nucleobases, 8 to 30 nucleobases, 8 to 25 nucleobases, 8 to 20 nucleobases, 8 to 15 nucleobases, 9 to 50 nucleobases, 9 to 40 nucleobases, 9 to 35 nucleobases, 9 to 30 nucleobases, 9 to 25 nucleobases, 9 to 20 nucleobases, 9 to 15 nucleobases, 10 to 50 nucleobases, 10 to 40 nucleobases, 10 to 35 nucleobases, 10 to 30 nucleobases, 10 to 25 nucleobases, 10 to 20 nucleobases, 10 to 15 nucleobases, 11 to 50 nucleobases, 11 to 40 nucleobases, 11 to 35 nucleobases, 11 to 30 nucleobases, 11 to 25 nucleobases, 11 to 20 nucleobases, 11 to 15 nucleobases, 12 to 50 nucleobases, 12 to 40 nucleobases, 12 to 35 nucleobases, 12 to 30 nucleobases, 12 to 25 nucleobases, 12 to 20 nucleobases, or 12 to 15 nucleobases.

[0162] Provided herein, in some aspects, is a composition comprising a vector encoding a polynucleotide comprising a sequence with at least about 80%, 85%, 90%, 95%, 97%, or 100% sequence identity to any one of the ASO sequences listed in Table 4, Table 5A, Table 5A-1, Table 5B, Table 5B-1, Table 5D, Table 5E, Table 5G, and Table 5G-1.

[0163] In some embodiments, the vector encoding the agent is a viral vector.

[0164] In some embodiments, the viral vector is an adenovirus-associated viral vector.

[0165] In some embodiments, the vector encoding the agent encodes a polynucleotide comprising an ASO sequence and an snRNA.

[0166] In some embodiments, the snRNA comprises a modified snRNA.

[0167] In some embodiments, the modified snRNA is a modified U1 snRNA or a modified U7 snRNA.

[0168] In some embodiments, the snRNA comprises a U1 snRNA.

[0169] In some embodiments, the ASO sequence comprises a sequence with at least about 80%, 85%, 90%, 95%, 97%, or 100% sequence identity to any one of the ASO sequences listed in Table 4, Table 5A, Table 5B, Table 5D, Table 5E, and Table 5G.

[0170] In some embodiments, the snRNA comprises a U7 snRNA.

[0171] In some embodiments, the ASO comprises a sequence with at least about 80%, 85%, 90%, 95%, 97%, or 100% sequence identity to any one of the ASO sequences listed in Table 4, Table 5A, Table 5A-1, Table 5B, Table 5B-1, Table 5G, and Table 5G-1.

[0172] Provided herein, in some aspects, is a pharmaceutical composition comprising the composition described herein; and a pharmaceutically acceptable excipient and/or a delivery vehicle.

[0173] Provided herein, in some aspects, is a method of treating or reducing the likelihood of developing a disease or condition in a subject in need thereof, the method comprising: administering to the subject a pharmaceutical composition described herein.

### INCORPORATION BY REFERENCE

[0174] All publications, patents, and patent applications mentioned in this specification are herein incorporated by reference to the same extent as if each individual publication, patent, or patent application was specifically and individually indicated to be incorporated by reference.

### BRIEF DESCRIPTION OF THE DRAWINGS

[0175] The novel features of the disclosure are set forth with particularity in the appended claims. A better understanding of the features and advantages of the present disclosure will be obtained by reference to the following detailed description that sets forth illustrative embodiments, in which the principles of the disclosure are utilized, and the accompanying drawings of which:

[0176] FIGS. 1A-1B depict schematic representations of a target pre-mRNA that contains an alternatively-spliced coding exon (ASCE) which may be alternatively-spliced to produce a non-productive mRNA that undergoes nonsense mediated RNA decay (NMD) and therapeutic agent-mediated promotion of canonical splicing to increase expression of functional mRNA or the full-length target protein target mRNA.

[0177] FIG. 1A shows a cell divided into nuclear and cytoplasmic compartments. In the nucleus, a pre-mRNA transcript of a target gene undergoes splicing to generate mRNA, and this mRNA is exported to the cytoplasm and translated into target protein. For this target gene, some fraction of the pre-mRNA is alternatively-spliced leading to formation of a processed mRNA lacking the ASCE (non-productive mRNA) that undergoes NMD and is degraded in the cytoplasm, thus leading to no target protein production from the non-productive mRNA.

[0178] FIG. 1B shows an example of the same cell divided into nuclear and cytoplasmic compartments. Treatment with a therapeutic agent, such as an antisense oligomer (ASO), promotes inclusion of the ASCE in an mRNA processed from the pre-mRNA resulting in an increase in functional (productive) mRNA containing the ASCE, which is in turn translated into higher levels of target proteins.

[0179] FIG. 1C shows the difference between two alternative splicing events of a pre-mRNA transcript where one of the alternative splicing events leads to the formation of a non-productive mRNA lacking an ASCE (bottom) and where the other alternative splicing events leads to the formation of a productive mRNA containing the ASCE (top).

[0180] FIG. 1D shows the difference between two alternative splicing events of a NSD1 pre-mRNA transcript where one of the alternative splicing events leads to the formation of a non-productive mRNA lacking an ASCE (exon 8) (bottom) and where the other alternative splicing events leads to the formation of a productive mRNA containing the ASCE (exon 8) (top).

[0181] FIGS. 2A-2C depict confirmation of exemplary alternative splicing events of an ASCE in the NSD1 gene via cycloheximide treatment in astrocytes, Schwann cells and cynomolgus monkey brain cells.

[0182] FIG. 2A depicts a schematic in which peaks corresponding to RNA sequencing reads were identified in exon 8 of NSD1 (GRCh38/hg38: chr5 177238237:177238507).

[0183] FIG. 2B depicts gel images and a graph showing that cycloheximide treatment led to increase in the amount of non-productive mature NSD1 mRNA transcripts (processed NSD1 mRNA containing a premature termination codon rendering the transcript a target of NMD) in various human cells, including astrocytes, Schwann cells, HEK293 cells, SH-SY-5Y (neuroblastoma cell line) cells, and SK-N-AS (neuroblastoma cell line) cells.

[0184] FIG. 2C depicts a gel image and a graph showing the existence of non-productive mature NSD1 mRNA transcript in various cynomolgus brain regions, including cortex, brain stem, hippocampus, and cerebellum.

[0185] FIG. 2D depicts a gel image and a graph showing the existence of non-productive mature NSD1 mRNA transcript in human cortex.

[0186] FIGS. 3A-3D depict confirmation of inclusion or exclusion an ASCE of mouse NSD1 (mouse exon 7, corresponding to human exon 8) in NSD1 mRNA products processed from NSD1 pre-mRNA in mouse brains via in vivo or ex vivo cycloheximide treatment.

[0187] FIG. 3A depicts gel images showing that, in ex vivo cycloheximide-treated mouse brains, exclusion of an ASCE of mouse NSD1 (mouse exon 7, corresponding to human exon 8) leads to formation of a processed mRNA containing a premature termination codon rendering the transcript a target of NMD.

[0188] FIG. 3B depicts graphs of the percentage of NMD (top) and fold-change (bottom) of the NMD event of the non-productive NSD1 mRNA product relative to NSD1 productive NSD1 mRNA product from the gel images of FIG. 3A.

[0189] FIG. 3C depicts gel images showing that, in in vivo cycloheximide-treated mouse brains, exclusion of an ASCE of mouse NSD1 (mouse exon 7, corresponding to human exon 8) leads to formation of a processed mRNA containing a premature termination codon rendering the transcript a target of NMD.

[0190] FIG. 3D depicts graphs of the percentage of NMD (left) and fold-change (right) of the NMD event of the non-productive NSD1 mRNA product relative to NSD1 productive NSD1 mRNA product from the gel images of FIG. 3C.

[0191] FIGS. 4A-4B depict confirmation of inclusion or exclusion an ASCE of mouse NSD1 (mouse exon 7, corresponding to human exon 8) in NSD1 mRNA products processed from NSD1 pre-mRNA in mouse brains via in vivo cycloheximide treatment.

[0192] FIG. 4A depicts a gel image showing that, in in vivo cycloheximide-treated mouse brains, exclusion of an ASCE of mouse NSD1 (mouse exon 7, corresponding to human exon 8) leads to formation of a processed mRNA containing a premature termination codon rendering the transcript a target of NMD.

[0193] FIG. 4B depicts graphs of the percentage of NMD (left) and fold-change (right) of the NMD event of the non-productive NSD1 mRNA product relative to NSD1 productive NSD1 mRNA product from the gel images of FIG. 4A.

[0194] FIG. 5 depicts an exemplary ASO walk around the human NSD1 exon 8 (GRCh38/hg38: chr5 177238237:177238507) region. The underlined nucleotides correspond to the exon skipping event and arrows point to canonical 5′ or 3′ splice sites. Figure discloses SEQ ID NOS: 1775-1780, respectively, in order of appearance.

[0195] FIGS. 6A-6B show graphs summarizing the changes in the level of productive NSD1 mRNA (FIG. 6A) and non-productive NSD1 mRNA (FIG. 6B) in one ASO walk around exon 8 in HEK293 cells.

[0196] FIGS. 7A-7B show graphs summarizing the changes in the level of productive NSD1 mRNA (FIG. 7A) and non-productive NSD1 mRNA (FIG. 7B) in one ASO walk around exon 8.

[0197] FIG. 8 depicts an exemplary ASO walk around the human NSD1 exon 8 (GRCh38/hg38: chr5 177238237:177238507) region for an ASO vectorization approach using U7 snRNA.

[0198] FIG. 9 depicts an exemplary ASO walk around the human NSD1 exon 8 (GRCh38/hg38: chr5 177238237:177238507) region for an ASO vectorization approach using U1 snRNA.

[0199] FIG. 10 shows representative histograms of non-productive NSD1 mRNA levels when different cell lines are treated with alternative NMD inhibitors. SH-SY5Y, U-87 MG, HEK293, and SK-N-AS cell lines were each treated with one of three conditions: a mock control (vehicle only), NMD inhibitor cycloheximide (CHX), or NMD inhibitor SMG1i. Treatment with SMG1i resulted in ˜28% NSD1 non-productive mRNA (percentage of the level of non-productive NSD1 mRNA transcript in the total level of all NSD1 mRNA transcripts) in U-87 MG cells, ˜19% NSD1 non-productive mRNA levels in SH-SY5Y cells, and <˜18% NSD1 non-productive mRNA levels in HEK293 and SK-N-AS cells. Treatment with CHX resulted in ˜23% NSD1 non-productive mRNA in SH-SY5Y cells, ˜15% NSD1 non-productive mRNA in U-87 MG cells, and ˜13% NSD1 non-productive mRNA in HEK293 and SK-N-AS cells. In cells treated only with vehicle (mock), the percentage of non-productive RNA remained low.

[0200] FIGS. 11A-11C show data demonstrating that exemplary ASOs with alternative backbone modifications have similar effects on NSD1 pre-mRNA splicing. FIG. 11A is a table showing the ASO names, their backbone chemistries, sequences, and lengths. Figure discloses SEQ ID NOS: 1768-1774, respectively, in order of appearance. FIG. 11B is a scatterplot showing the fold change in productive and non-productive NSD1 mRNA when various ASOs with either PMO or 2′MOE-PS backbone modifications were nucleofected into U-87 MG cells, relative to cells treated with mock control. FIG. 11C is a histogram of the NSD1 protein levels present in U-87 MG cells after treatment with the ASOs of the various backbones (see FIG. 11A), relative to cells treated with mock control. Data from both FIG. 11B and FIG. 11C are normalized to the mock controls.

[0201] FIGS. 12A-12B depict representative data illustrating the effects of exemplary ASOs on NSD1 protein expression and H3K36me2 levels in U-87 MG cells. FIG. 12A is a histogram showing the fold change of NSD1 protein in U-87 MG cells treated with various ASOs, relative to cells treated with water only. FIG. 12B is a histogram showing the fold change in cellular H3K36me2 levels in U-87 MG cells treated with various ASOs, relative to cells treated with water only. U-87 cells were nucleofected with 1 μM of each ASO and cells were harvested 72 hours after nucleofection. NSD1 protein levels were measured by immuno-capillary electrophoresis (JESS), and H3K36me2 levels were measured by AlphaLISA®. The data present in FIGS. 12A-12B are the sum of 2-3 independent experiments; mean±SEM.

[0202] FIGS. 13A-13C depict representative data illustrating the dose-dependent effect of an exemplary ASO on NSD1 protein expression and H3K36me2 levels in U-87 MG cells. FIG. 13A is a histogram showing the fold change of NSD1 protein in U-87 MG cells treated with ASO 211 at various dosage concentrations (0.25 μM, 0.5 μM, 1.0 μM, or 2.0 μM), relative to cells treated with water only. FIG. 13B is a histogram showing the fold change in cellular H3K36me2 levels in U-87 MG cells treated ASO 211 at various dosage concentrations (0.25 μM, 0.5 μM, 1.0 μM, or 2.0 μM), relative to cells treated with water only. FIG. 13C is a histogram showing the total Histone H3 levels present in U-87 cells treated with ASO 211 at various dosage concentrations, as compared to cells treated with water only. U-87 cells were nucleofected with ASO 211 at four tested dosages (0.25 μM, 0.5 μM, 1.0 μM, or 2.0 μM) and cells were harvested 72 hours after nucleofection. NSD1 protein measured by immuno-capillary electrophoresis (JESS), and H3K36me2 levels were measured by AlphaLISA®. Total cellular Histone H3 levels were also measured by AlphaLISA®. The data present in FIGS. 13A-13C are the sum of 2-3 independent experiments; mean±SEM; one-way ANOVA; * pval<0.05, ***pval<0.01; ****pval<0.001.

### DETAILED DESCRIPTION

[0203] Certain specific details of this description are set forth in order to provide a thorough understanding of various embodiments. However, one skilled in the art will understand that the present disclosure may be practiced without these details. In other instances, well-known structures have not been shown or described in detail to avoid unnecessarily obscuring descriptions of the embodiments. Unless the context requires otherwise, throughout the specification and claims which follow, the word “comprise” and variations thereof, such as, “comprises” and “comprising” are to be construed in an open, inclusive sense, that is, as “including, but not limited to.” Further, headings provided herein are for convenience only and do not interpret the scope or meaning of the claimed disclosure.

[0204] As used in this specification and the appended claims, the singular forms “a,” “an,” and “the” include plural referents unless the content clearly dictates otherwise. It should also be noted that the term “or” is generally employed in its sense including “and/or” unless the content clearly dictates otherwise.

[0205] The coordinate as used herein refers to the coordinate of the genome reference assembly GRCh38 (Genome Research Consortium human build 38), also known as Hg38 (Human genome build 38).

[0206] Unless otherwise defined, all technical and scientific terms used herein have the same meaning as commonly understood by one of ordinary skill in the art to which this disclosure belongs. Although methods and materials similar or equivalent to those described herein can be used in the practice or testing of the present disclosure, suitable methods and materials are described below.

[0207] Alternative splicing events in PKD1, ABCA4, FUS, CEL or NSD1 gene can lead to non-productive mRNA transcripts which in turn can lead to reduced protein expression, and therapeutic agents which can target the alternative splicing events in PKD1, ABCA4, FUS, CEL or NSD1 gene can modulate (e.g., increase) the expression level of functional proteins in patients. Such therapeutic agents can be used to treat a condition caused by deficiency in amount or activity of polycystin-1, retinal-specific phospholipid-transporting ATPase ABCA4, RNA-binding protein FUS, bile salt-activated lipase, or Histone-lysine N-methyltransferase, H3 lysine-36 specific.

[0208] One alternative splicing event that can lead to non-productive mRNA transcripts is an alternatively-spliced coding exon (ASCE) event. For example, exclusion of an alternatively-spliced coding exon can result in a processed mRNA that is shorter than a corresponding processed mRNA in which the ASCE is included (the shorter processed mRNA is also termed “alternative processed mRNA” herein). For example, skipping of an alternatively-spliced coding exon can result in a processed mRNA that is shorter than a corresponding processed mRNA in which the ASCE is included. For example, exclusion of an alternatively-spliced coding exon resulting from the reduced or inhibited splicing of a 3′ splice-site of the ASCE (e.g., the canonical 3′ ss) and/or reduced or inhibited splicing of a 5′ splice-site of the ASCE (e.g., the canonical 5′ ss) can result in a processed mRNA that is shorter than a corresponding processed mRNA in which the ASCE is included. The present disclosure provides compositions and methods for modulating alternative splicing of PKD1, ABCA4, FUS, CEL or NSD1 pre-mRNA to increase the production of protein-coding mature mRNA, and thus, translated functional polycystin-1, retinal-specific phospholipid-transporting ATPase ABCA4, RNA-binding protein FUS, bile salt-activated lipase, or Histone-lysine N-methyltransferase, H3 lysine-36 specific. For example, the compositions and methods provided herein can modulate processing of PKD1, ABCA4, FUS, CEL or NSD1 pre-mRNA by promoting or increasing splicing of a 3′ splice-site of the ASCE (e.g., the canonical 3′ ss) and/or promoting or increasing splicing of a 5′ splice-site of the ASCE (e.g., the canonical 5′ ss). For example, the compositions and methods provided herein can modulate processing of PKD1, ABCA4, FUS, CEL or NSD1 pre-mRNA by promoting or increasing splicing of a 3′ splice-site of the intron upstream of the ASCE and/or by promoting or increasing splicing of a 5′ splice-site of the intron downstream of the ASCE.

[0209] These compositions and methods include antisense oligomers (ASOs) or vectors encoding ASOs that can promote constitutive splicing of PKD1, ABCA4, FUS, CEL or NSD1 pre-mRNA. For example, these compositions and methods include ASOs or vectors encoding ASOs that can promote inclusion of an ASCE in a processed mRNA that is processed from a PKD1, ABCA4, FUS, CEL or NSD1 pre-mRNA. In various embodiments, functional polycystin-1, retinal-specific phospholipid-transporting ATPase ABCA4, RNA-binding protein FUS, bile salt-activated lipase, or Histone-lysine N-methyltransferase, H3 lysine-36 specific can be increased using the methods of the disclosure to treat a condition caused by deficient amount or activity of polycystin-1, retinal-specific phospholipid-transporting ATPase ABCA4, RNA-binding protein FUS, bile salt-activated lipase, or Histone-lysine N-methyltransferase, H3 lysine-36 specific protein.

[0210] “Polycystin-1” or “PC1,” also known as Autosomal dominant polycystic kidney disease 1 protein, as referred to herein, can be encoded by a PKD1 gene and can be a membrane protein involved in cell-to-cell or cell-matrix interactions that can be a component of a heteromeric calcium-permeable ion channel formed with polycystin-2 (encoded by a PKD2 gene) that is activated by interaction with a Wnt family member, such as WNT3A and WNT9B, and that regulates multiple signaling pathways to maintain normal renal tubular structure and function, includes any of the recombinant or naturally-occurring forms of polycystin-1 or variants or homologs thereof that have or maintain polycystin-1 activity (e.g., at least 40% 50%, 60%, 70%, 80%, 90%, 95%, 96%, 97%, 98%, 99% or 100% activity). In some aspects, the variants or homologs have at least 40%, 45%, 50%, 55%, 60%, 65%, 70%, 75%, 80%, 85%, 90%, 95%, 96%, 97%, 98%, 99%, or 100% amino acid sequence identity across the whole sequence or a portion of the sequence (e.g., a 50, 100, 150 or 200 continuous amino acid portion) compared to a naturally occurring polycystin-1. In some embodiments, polycystin-1 is substantially identical to the protein identified by the UniProt reference number P98161 or a variant or homolog having substantial identity thereto.

[0211] “Retinal-specific phospholipid-transporting ATPase ABCA4,” also known as ATP binding cassette subfamily A member 4, RIM ABC transporter (RIM protein or RmP), Retinal-specific ATP-binding cassette transporter, or Stargardt disease protein, as referred to herein, can be encoded by a ABCA4 gene (also known as ABCR) and can be a membrane-associated protein that is a member of the superfamily of ATP-binding cassette (ABC) transporters that can be a retina-specific ABC transporter with N-retinylidene-PE as a substrate, and can be expressed exclusively in retina photoreceptor cells and can mediate transport of an essential molecule, all-trans-retinal aldehyde (atRAL), across the photoreceptor cell membrane, includes any of the recombinant or naturally-occurring forms of Retinal-specific phospholipid-transporting ATPase ABCA4 or variants or homologs thereof that have or maintain Retinal-specific phospholipid-transporting ATPase ABCA4 activity (e.g., at least 40% 50%, 60%, 70%, 80%, 90%, 95%, 96%, 97%, 98%, 99% or 100% activity). In some aspects, the variants or homologs have at least 40%, 45%, 50%, 55%, 60%, 65%, 70%, 75%, 80%, 85%, 90%, 95%, 96%, 97%, 98%, 99%, or 100% amino acid sequence identity across the whole sequence or a portion of the sequence (e.g., a 50, 100, 150 or 200 continuous amino acid portion) compared to a naturally occurring Retinal-specific phospholipid-transporting ATPase ABCA4. In some embodiments, Retinal-specific phospholipid-transporting ATPase ABCA4 is substantially identical to the protein identified by the UniProt reference number P78363 or a variant or homolog having substantial identity thereto.

[0212] “RNA-binding protein FUS,” also known as FUS RNA binding protein, 75 kDa DNA-pairing protein, Oncogene FUS, Oncogene TLS, POMp75, or Translocated in liposarcoma protein, as referred to herein, can be encoded by a FUS gene (also known as TLS) and can be a DNA/RNA-binding protein that plays a role in various cellular processes such as transcription regulation, RNA splicing, RNA transport, DNA repair and damage response, includes any of the recombinant or naturally-occurring forms of RNA-binding protein FUS or variants or homologs thereof that have or maintain RNA-binding protein FUS activity (e.g., at least 40% 50%, 60%, 70%, 80%, 90%, 95%, 96%, 97%, 98%, 99% or 100% activity). In some aspects, the variants or homologs have at least 40%, 45%, 50%, 55%, 60%, 65%, 70%, 75%, 80%, 85%, 90%, 95%, 96%, 97%, 98%, 99%, or 100% amino acid sequence identity across the whole sequence or a portion of the sequence (e.g., a 50, 100, 150 or 200 continuous amino acid portion) compared to a naturally occurring RNA-binding protein FUS. In some embodiments, RNA-binding protein FUS is substantially identical to the protein identified by the UniProt reference number P35637 or a variant or homolog having substantial identity thereto.

[0213] “Bile salt-activated lipase,” also known as Carboxyl ester lipase, Bile salt-stimulated lipase (BSSL), Bucelipase, Cholesterol esterase, Pancreatic lysophospholipase, or Sterol esterase, as referred to herein, can be encoded by a CEL gene (also known as BAL) and can catalyzes the hydrolysis of a wide range of substrates including cholesteryl esters, phospholipids, lysophospholipids, di- and tri-acylglycerols, and fatty acid esters of hydroxy fatty acids (FAHFAs), includes any of the recombinant or naturally-occurring forms of Bile salt-activated lipase or variants or homologs thereof that have or maintain Bile salt-activated lipase activity (e.g., at least 40% 50%, 60%, 70%, 80%, 90%, 95%, 96%, 97%, 98%, 99% or 100% activity). In some aspects, the variants or homologs have at least 40%, 45%, 50%, 55%, 60%, 65%, 70%, 75%, 80%, 85%, 90%, 95%, 96%, 97%, 98%, 99% or 100% amino acid sequence identity across the whole sequence or a portion of the sequence (e.g., a 50, 100, 150 or 200 continuous amino acid portion) compared to a naturally occurring Bile salt-activated lipase In some embodiments, Bile salt-activated lipase is substantially identical to the protein identified by the UniProt reference number P19835 or a variant or homolog having substantial identity thereto.

[0214] “Histone-lysine N-methyltransferase, H3 lysine-36 specific,” also known as Androgen receptor coactivator 267 kDa protein, Androgen receptor-associated protein of 267 kDa, H3-K36-HMTase, Lysine N-methyltransferase 3B, Nuclear receptor-binding SET domain-containing protein 1 (NR-binding SET domain-containing protein), as referred to herein, can be encoded by a NSD1 gene (also known as ARA267 and KMT3B) and can be a histone methyltransferase that dimethylates Lys-36 of histone H3 (H3K36me2) and can be a transcriptional intermediary factor capable of both negatively or positively influencing transcription, depending on the cellular context, includes any of the recombinant or naturally-occurring forms of Histone-lysine N-methyltransferase, H3 lysine-36 specific or variants or homologs thereof that have or maintain Histone-lysine N-methyltransferase, H3 lysine-36 specific activity (e.g., at least 40% 50%, 60%, 70%, 80%, 90%, 95%, 96%, 97%, 98%, 99% or 100% activity). In some aspects, the variants or homologs have at least 40%, 45%, 50%, 55%, 60%, 65%, 70%, 75%, 80%, 85%, 90%, 95%, 96%, 97%, 98%, 99% or 100% amino acid sequence identity across the whole sequence or a portion of the sequence (e.g., a 50, 100, 150 or 200 continuous amino acid portion) compared to a naturally occurring Histone-lysine N-methyltransferase, H3 lysine-36 specific In some embodiments, Histone-lysine N-methyltransferase, H3 lysine-36 specific is substantially identical to the protein identified by the UniProt reference number Q96L73 or a variant or homolog having substantial identity thereto.

[0215] The terms “alternatively-spliced coding exon” or “ASCE” are used interchangeably and can refer to a coding exon (e.g., a canonical exon) that can prevent activation of the nonsense-mediated mRNA decay (NMD) pathway if present in a mature RNA transcript or promote activation of the NMD pathway if absent in a mature RNA transcript. In constitutive splicing events, the ASCE is usually not spliced out, but the ASCE may be excluded during alternative or aberrant splicing events. Mature mRNA transcripts lacking an ASCE may be non-productive, for example, due to frame shifts which induce the NMD pathway. In some embodiments, an ASCE is a skipped exon. In some embodiments, an ASCE is an exon that leads to an alteration of reading frame when the ASCE is not included in a mature or processed mRNA. In some embodiments, an ASCE is an exon containing a number of nucleotides that is not evenly divisible by 3. In some embodiments, a mature or processed mRNA in which the ASCE has been excluded contains a premature stop codon (or premature termination codon (PTC)) or other sequences that facilitate degradation of a mature RNA transcript in which the ASCE has been excluded. Exclusion of an ASCE in mature or processed RNA transcripts may downregulate gene expression. In some embodiments, a mature or processed mRNA in which the ASCE has been excluded is created from alternative splicing events. For example, a mature or processed mRNA in which the ASCE has been excluded can be created from an alternative 3′ splice site event. For example, a mature or processed mRNA in which the ASCE has been excluded can be created from an alternative 5′ splice site event. For example, a mature or processed mRNA in which the ASCE has been excluded can be created from an alternative 5′ splice site event and an alternative 3′ splice site event. For example, a mature or processed mRNA in which the ASCE has been excluded can be created from an exon skipping event. For example, an ASCE can be a canonical exon. For example, only exons that are evenly divisible by 3 can be skipped or included in the mRNA without any alteration of reading frame.

[0216] Alternative splicing can result in exclusion of at least one ASCE in the mature mRNA transcripts. The terms “mature mRNA,” and “fully spliced mRNA,” are used interchangeably herein to describe a fully processed mRNA. A mature mRNA that lacks an ASCE can be non-productive mRNA and lead to NMD of the mature mRNA. Mature mRNA lacking an ASCE may sometimes lead to reduced protein expression compared to protein expression from a corresponding mature mRNA that contains the ASCE.

[0217] Pseudo splice sites have the same splicing recognition sequences as genuine splice sites but are not used in splicing reactions. They outnumber genuine splice sites in the human genome by an order of a magnitude and are normally repressed by thus far poorly understood molecular mechanisms. Cryptic 5′ splice sites have the consensus NNN/GUNNNN or NNN/GCNNNN where N is any nucleotide and/is the exon-intron boundary. Cryptic 3′ splice sites have the consensus NAG/N. Their activation is positively influenced by surrounding nucleotides that make them more similar to the optimal consensus of authentic splice sites, namely MAG/GURAGU and YAG/G, respectively, where M is C or A, R is G or A, and Y is C or U.

[0218] Splice sites and their regulatory sequences can be readily identified by a skilled person using suitable algorithms publicly available, listed for example in Kralovicova, J. and Vorechovsky, I. (2007) Global control of aberrant splice site activation by auxiliary splicing sequences: evidence for a gradient in exon and intron definition. Nucleic Acids Res., 35, 6399-6413, (ncbi.nlm.nih.gov/pmc/articles/PMC2095810/pdf/gkm680.pdf).

Splicing and Nonsense-Mediated mRNA Decay

[0219] Intervening sequences or introns are removed by a large and highly dynamic RNA-protein complex termed the spliceosome, which orchestrates complex interactions between primary transcripts, small nuclear RNAs (snRNAs) and a large number of proteins. Spliceosomes assemble ad hoc on each intron in an ordered manner, starting with recognition of the 5′ splice site (5′ss) by U1 snRNA or the 3′ splice site (3′ss) by the U2 pathway, which involves binding of the U2 auxiliary factor (U2AF) to the 3′ss region to facilitate U2 binding to the branch point sequence (BPS). U2AF is a stable heterodimer composed of a U2AF2-encoded 65-kD subunit (U2AF65), which binds the polypyrimidine tract (PPT), and a U2AF1-encoded 35-kD subunit (U2AF35), which interacts with highly conserved AG dinucleotides at 3′ss and stabilizes U2AF65 binding. In addition to the BPS/PPT unit and 3′ss/5′ss, accurate splicing requires auxiliary sequences or structures that activate or repress splice site recognition, known as intronic or exonic splicing enhancers or silencers. These elements allow genuine splice sites to be recognized among a vast excess of cryptic or pseudo-sites in the genome of higher eukaryotes, which have the same sequences but outnumber authentic sites by an order of magnitude. Although they often have a regulatory function, the exact mechanisms of their activation or repression are poorly understood.

[0220] The decision of whether to splice or not to splice can be typically modeled as a stochastic rather than deterministic process, such that even the most defined splicing signals can sometimes splice incorrectly. However, under normal conditions, pre-mRNA splicing proceeds at surprisingly high fidelity. This is attributed in part to the activity of adjacent cis-acting auxiliary exonic and intronic splicing regulatory elements (ESRs or ISRs). Typically, these functional elements are classified as either exonic or intronic splicing enhancers (ESEs or ISEs) or silencers (ESSs or ISSs) based on their ability to stimulate or inhibit splicing, respectively. Although there is now evidence that some auxiliary cis-acting elements may act by influencing the kinetics of spliceosome assembly, such as the arrangement of the complex between U1 snRNP and the 5′ss, it seems very likely that many elements function in concert with trans-acting RNA-binding proteins (RBPs). For example, the serine- and arginine-rich family of RBPs (SR proteins) is a conserved family of proteins that have a key role in defining exons. SR proteins promote exon recognition by recruiting components of the pre-spliceosome to adjacent splice sites or by antagonizing the effects of ESSs in the vicinity. The repressive effects of ESSs can be mediated by members of the heterogeneous nuclear ribonucleoprotein (hnRNP) family and can alter recruitment of core splicing factors to adjacent splice sites. In addition to their roles in splicing regulation, silencer elements are suggested to have a role in repression of pseudo-exons, sets of decoy intronic splice sites with the typical spacing of an exon but without a functional open reading frame. ESEs and ESSs, in cooperation with their cognate trans-acting RBPs, represent important components in a set of splicing controls that specify how, where and when mRNAs are assembled from their precursors.

[0221] The sequences marking the exon-intron boundaries are degenerate signals of varying strengths that can occur at high frequency within human genes. In multi-exon genes, different pairs of splice sites can be linked together in many different combinations, creating a diverse array of transcripts from a single gene. This is commonly referred to as alternative pre-mRNA splicing. Although most mRNA isoforms produced by alternative splicing can be exported from the nucleus and translated into functional polypeptides, different mRNA isoforms from a single gene can vary greatly in their translation efficiency. Those mRNA isoforms with premature termination codons (PTCs) or premature stop codons at least 50 bp upstream of an exon junction complex are likely to be targeted for degradation by the nonsense-mediated mRNA decay (NMD) pathway. Mutations in traditional (BPS/PPT/3′ss/5′ss) and auxiliary splicing motifs can cause aberrant splicing, such as exon skipping or cryptic (or pseudo-) exon inclusion or splice-site activation and contribute significantly to human morbidity and mortality. Both aberrant and alternative splicing patterns can be influenced by natural DNA variants in exons and introns.

[0222] Given that exon-intron boundaries can occur at any of the three positions of a codon, it is clear that only a subset of alternative splicing events can maintain the canonical open reading frame. For example, only exons that are evenly divisible by 3 can be skipped or included in the mRNA without any alteration of reading frame. Splicing events that do not have compatible phases will induce a frameshift. Unless reversed by downstream events, frameshifts can certainly lead to one or more PTCs, probably resulting in subsequent degradation by NMD. NMD is a translation-coupled mechanism that eliminates mRNAs containing PTCs. NMD can function as a surveillance pathway that exists in all eukaryotes. NMD can reduce errors in gene expression by eliminating mRNA transcripts that contain premature stop codons or PTCs. Translation of these aberrant mRNAs could, in some cases, lead to deleterious gain-of-function or dominant-negative activity of the resulting proteins. NMD targets not only transcripts with PTCs but also a broad array of mRNA isoforms expressed from many endogenous genes, suggesting that NMD is a master regulator that drives both fine and coarse adjustments in steady-state RNA levels in the cell.

[0223] In some cases, a therapeutic agent comprises a modified snRNA, such as a modified human or murine snRNA. In some cases, a therapeutic agent comprises a vector, such as a viral vector, that encodes a modified snRNA. In some embodiments, the modified snRNA is a modified U1 snRNA (see, e.g., Alanis et al., Human Molecular Genetics, 2012, Vol. 21, No. 11 2389-2398). In some embodiments, the modified snRNA is a modified U7 snRNA (see, e.g., Gadgil et al., J Gene Med. 2021; 23:e3321). Modified U7 snRNAs can be made by any method known in the art including the methods described in Meyer, K.; Schümperli, Daniel (2012), Antisense Derivatives of U7 Small Nuclear RNA as Modulators of Pre-mRNA Splicing. In: Stamm, Stefan; Smith, Christopher W. J.; Lührmann, Reinhard (eds.) Alternative pre-mRNA Splicing: Theory and Protocols (pp. 481-494), Chichester: John Wiley & Sons 10.1002/9783527636778.ch45, incorporated by reference herein in its entirety. In some embodiments, a modified U7 (smOPT) does not compete with WT U7 (Stefanovic et al., 1995).

[0224] In some embodiments, the modified snRNA comprises an smOPT modification. For example, the modified snRNA can comprise a sequence AAUUUUUGGAG (SEQ ID NO: 1749). For example, the sequence AAUUUUUGGAG (SEQ ID NO: 1749) can replace a sequence AAUUUGUCUAG (SEQ ID NO: 1750) in a wild-type U7 snRNA to generate the modified U7 snRNA (smOPT). In some embodiments, a smOPT modification of a U7 snRNA renders the particle functionally inactive in histone pre-mRNA processing (Stefanovic et al., 1995). In some embodiments, a modified U7 (smOPT) is expressed stably in the nucleus and at higher levels than WT U7 (Stefanovic et al., 1995). In some embodiments, the snRNA comprises a U1 snRNP-targeted sequence. In some embodiments, the snRNA comprises a U7 snRNP-targeted sequence. In some embodiments, the snRNA comprises a modified U7 snRNP-targeted sequence and wherein the modified U7 snRNP-targeted sequence comprises smOPT. In some embodiments, the modified snRNA has been modified to comprise a single-stranded nucleotide sequence that hybridizes to a pre-mRNA, such as an ASCE-containing pre-mRNA. For example, the modified snRNA can be modified to comprise a single-stranded nucleotide sequence that hybridizes to PKD1, ABCA4, FUS, CEL or NSD1 pre-mRNA. In some embodiments, the modified snRNA is designed according to the format described in Table 5C or Table 5F. In some cases, the modified snRNA that comprises U7 snRNP-targeted sequence is designed according to the format described in Table 5C. In some cases, the modified snRNA that comprises U1 snRNP-targeted sequence is designed according to the format described in Table 5F. In some embodiments, a U7 snRNP-targeted sequence comprises a single-stranded nucleotide sequence that hybridizes to PKD1, ABCA4, FUS, CEL or NSD1 pre-mRNA, where the single-stranded nucleotide sequence starts with dinucleotides AA, such as the sequences in Table 5A-1, Table 5B-1, and Table 5G-1. In some of these embodiments, when designing a single-stranded nucleotide sequence that is complementary to a target sequence in the target pre-mRNA (e.g., PKD1, ABCA4, FUS, CEL or NSD1 pre-mRNA), if the sequence complementary to the target sequence starts with nucleotides other than dinucleotides AA on the 5′ end, dinucleotides AA will be added to its 5′ end; if the sequence complementary to the target sequence starts with one A nucleotide on the 5′ end that is followed by a non-A nucleotide, then one A will be added to its 5′ end. In some other cases, if the sequence complementary to the target sequence starts with dinucleotides AA on the 5′ end, then no additional A nucleotides will be added.

[0225] In some embodiments, the modified snRNA has been modified to comprise a single-stranded nucleotide sequence that hybridizes to a PKD1, ABCA4, FUS, CEL or NSD1 ASCE-containing pre-mRNA. In some embodiments, the modified snRNA has been modified to comprise a single-stranded nucleotide sequence that comprises one or two or more sequences of the ASOs disclosed herein. In some embodiments, the modified snRNA has been modified to comprise a single-stranded nucleotide sequence that hybridizes to sequence of a pre-mRNA with a mutation, such as a PKD1, ABCA4, FUS, CEL or NSD1 ASCE-containing pre-mRNA with a mutation. In some embodiments, the modified snRNA has been modified to comprise a single-stranded nucleotide sequence that comprises two or more sequences that hybridize to two or more target regions of an ASCE-containing pre-mRNA, such as a PKD1, ABCA4, FUS, CEL or NSD1 ASCE-containing pre-mRNA. For example, a modified snRNA can be modified to comprise a single-stranded nucleotide sequence that hybridizes to at least 8 contiguous nucleic acids of an ASCE-containing pre-mRNA, such as a PKD1, ABCA4, FUS, CEL or NSD1 ASCE-containing pre-mRNA. In some embodiments, the modified snRNA has been modified to comprise a single-stranded nucleotide sequence that hybridizes to any of the target regions of an ASCE-containing pre-mRNA, such as a PKD1, ABCA4, FUS, CEL or NSD1 ASCE-containing pre-mRNA disclosed herein. In some embodiments, the modified snRNA has been modified to comprise a single-stranded nucleotide sequence that comprises two or more sequences that hybridize to two or more target regions of an ASCE-containing pre-mRNA, such as a PKD1, ABCA4, FUS, CEL or NSD1 ASCE-containing pre-mRNA. For example, a modified snRNA can be modified to comprise a single-stranded nucleotide sequence that hybridizes to one or two or more sequences of an intron upstream of the ASCE, an intron downstream of the ASCE, an exon upstream of the ASCE, an exon downstream of the ASCE or within the ASCE of an ASCE-containing pre-mRNA, such as a PKD1, ABCA4, FUS, CEL or NSD1 ASCE-containing pre-mRNA, or to an ASCE-skipping regulatory sequence in the ASCE-containing pre-mRNA. For example, a modified snRNA can be modified to comprise a single-stranded nucleotide sequence that hybridizes to one or two or more sequences of an intron upstream of the ASCE. For example, a modified snRNA can be modified to comprise a single-stranded nucleotide sequence that hybridizes to one or two or more sequences of an intron downstream of the ASCE. For example, a modified snRNA can be modified to comprise a single-stranded nucleotide sequence that hybridizes to one or two or more sequences of an exon upstream of the ASCE. For example, a modified snRNA can be modified to comprise a single-stranded nucleotide sequence that hybridizes to one or two or more sequences of an exon downstream of the ASCE. For example, a modified snRNA can be modified to comprise a single-stranded nucleotide sequence that hybridizes to one or two or more sequences within the ASCE. For example, a modified snRNA can be modified to comprise a single-stranded nucleotide sequence that hybridizes to one or two or more sequences of an intron upstream of the ASCE, an intron downstream of the ASCE, an exon upstream of the ASCE, an exon downstream of the ASCE or within the ASCE of a PKD1, ABCA4, FUS, CEL or NSD1 ASCE-containing pre-mRNA (e.g., exon 38 of PKD1 (e.g., exon (GRCh38/hg38: chr16 2092954 2093093) of PKD1), e.g., exon 3 of ABCA4 (e.g., exon (GRCh38/hg38: chr1 94111438 94111579) of ABCA4), e.g., exon 7 of FUS (e.g., exon (GRCh38/hg38: chr16 31186802 31186836) of FUS), e.g., exon 5 of CEL (e.g., exon (GRCh38/hg38: chr9 133066530 133066660) of CEL), e.g., exon 8 of NSD1 (e.g., exon (GRCh38/hg38: chr5 177238237 177238507)) of NSD1). For example, a modified snRNA can be modified to comprise a single-stranded nucleotide sequence that hybridizes to a region within an ASCE or upstream or downstream of an ASCE (e.g., exon 38 of PKD1 (e.g., exon (GRCh38/hg38: chr16 2092954 2093093) of PKD1), e.g., exon 3 of ABCA4 (e.g., exon (GRCh38/hg38: chr1 94111438 94111579) of ABCA4), e.g., exon 7 of FUS (e.g., exon (GRCh38/hg38: chr16 31186802 31186836) of FUS), e.g., exon 5 of CEL (e.g., exon (GRCh38/hg38: chr9 133066530 133066660) of CEL), e.g., exon 8 of NSD1 (e.g., exon (GRCh38/hg38: chr5 177238237 177238507)) of NSD1). In some embodiments, the modified snRNA has a 5′ region that has been modified to comprise a single-stranded nucleotide sequence that hybridizes to an ASCE-containing pre-mRNA, such as a PKD1, ABCA4, FUS, CEL or NSD1 ASCE-containing pre-mRNA. In some embodiments, the modified snRNA has a 3′ region that has been modified to comprise a single-stranded nucleotide sequence that hybridizes to an ASCE-containing pre-mRNA, such as a PKD1, ABCA4, FUS, CEL or NSD1 ASCE-containing pre-mRNA.

[0226] For example, a modified snRNA can be modified to comprise a single-stranded nucleotide sequence that hybridizes to a region that does not overlap with an ASCE and an intron upstream of the ASCE (e.g., exon 38 of PKD1 (e.g., exon (GRCh38/hg38: chr16 2092954 2093093) of PKD1), e.g., exon 3 of ABCA4 (e.g., exon (GRCh38/hg38: chr1 94111438 94111579) of ABCA4), e.g., exon 7 of FUS (e.g., exon (GRCh38/hg38: chr16 31186802 31186836) of FUS), e.g., exon 5 of CEL (e.g., exon (GRCh38/hg38: chr9 133066530 133066660) of CEL), e.g., exon 8 of NSD1 (e.g., exon (GRCh38/hg38: chr5 177238237 177238507)) of NSD1). For example, a modified snRNA can be modified to comprise a single-stranded nucleotide sequence that does not hybridize to a region that overlaps with an ASCE and an intron downstream of the ASCE (e.g., exon 38 of PKD1 (e.g., exon (GRCh38/hg38: chr16 2092954 2093093) of PKD1), e.g., exon 3 of ABCA4 (e.g., exon (GRCh38/hg38: chr1 94111438 94111579) of ABCA4), e.g., exon 7 of FUS (e.g., exon (GRCh38/hg38: chr16 31186802 31186836) of FUS), e.g., exon 5 of CEL (e.g., exon (GRCh38/hg38: chr9 133066530 133066660) of CEL), e.g., exon 8 of NSD1 (e.g., exon (GRCh38/hg38: chr5 177238237 177238507)) of NSD1).

[0227] For example, a modified snRNA can be modified to comprise a single-stranded nucleotide sequence that is complementary to an exon sequence or an intron sequence that is downstream of an ASCE (e.g., exon 38 of PKD1 (e.g., exon (GRCh38/hg38: chr16 2092954 2093093) of PKD1), e.g., exon 3 of ABCA4 (e.g., exon (GRCh38/hg38: chr1 94111438 94111579) of ABCA4), e.g., exon 7 of FUS (e.g., exon (GRCh38/hg38: chr16 31186802 31186836) of FUS), e.g., exon 5 of CEL (e.g., exon (GRCh38/hg38: chr9 133066530 133066660) of CEL), e.g., exon 8 of NSD1 (e.g., exon (GRCh38/hg38: chr5 177238237 177238507)) of NSD1). For example, a modified snRNA can be modified to comprise a single-stranded nucleotide sequence that is not complementary to a 3′ splice site of an intron sequence that is downstream of an ASCE (e.g., exon 38 of PKD1 (e.g., exon (GRCh38/hg38: chr16 2092954 2093093) of PKD1), e.g., exon 3 of ABCA4 (e.g., exon (GRCh38/hg38: chr1 94111438 94111579) of ABCA4), e.g., exon 7 of FUS (e.g., exon (GRCh38/hg38: chr16 31186802 31186836) of FUS), e.g., exon 5 of CEL (e.g., exon (GRCh38/hg38: chr9 133066530 133066660) of CEL), e.g., exon 8 of NSD1 (e.g., exon (GRCh38/hg38: chr5 177238237 177238507)) of NSD1). For example, a modified snRNA can be modified to comprise a single-stranded nucleotide sequence that is not complementary to a 5′ splice site of an intron sequence that is downstream of an ASCE (e.g., exon 38 of PKD1 (e.g., exon (GRCh38/hg38: chr16 2092954 2093093) of PKD1), e.g., exon 3 of ABCA4 (e.g., exon (GRCh38/hg38: chr1 94111438 94111579) of ABCA4), e.g., exon 7 of FUS (e.g., exon (GRCh38/hg38: chr16 31186802 31186836) of FUS), e.g., exon 5 of CEL (e.g., exon (GRCh38/hg38: chr9 133066530 133066660) of CEL), e.g., exon 8 of NSD1 (e.g., exon (GRCh38/hg38: chr5 177238237 177238507)) of NSD1).

[0228] For example, a modified snRNA can be modified to comprise a single-stranded nucleotide sequence that is complementary to an intron sequence that is upstream of an ASCE (e.g., exon 38 of PKD1 (e.g., exon (GRCh38/hg38: chr16 2092954 2093093) of PKD1), e.g., exon 3 of ABCA4 (e.g., exon (GRCh38/hg38: chr1 94111438 94111579) of ABCA4), e.g., exon 7 of FUS (e.g., exon (GRCh38/hg38: chr16 31186802 31186836) of FUS), e.g., exon 5 of CEL (e.g., exon (GRCh38/hg38: chr9 133066530 133066660) of CEL), e.g., exon 8 of NSD1 (e.g., exon (GRCh38/hg38: chr5 177238237 177238507)) of NSD1). For example, a modified snRNA can be modified to comprise a single-stranded nucleotide sequence that is not complementary to a splice site of an intron sequence that is upstream of an ASCE (e.g., exon 38 of PKD1 (e.g., exon (GRCh38/hg38: chr16 2092954 2093093) of PKD1), e.g., exon 3 of ABCA4 (e.g., exon (GRCh38/hg38: chr1 94111438 94111579) of ABCA4), e.g., exon 7 of FUS (e.g., exon (GRCh38/hg38: chr16 31186802 31186836) of FUS), e.g., exon 5 of CEL (e.g., exon (GRCh38/hg38: chr9 133066530 133066660) of CEL), e.g., exon 8 of NSD1 (e.g., exon (GRCh38/hg38: chr5 177238237 177238507)) of NSD1). For example, a modified snRNA can be modified to comprise a single-stranded nucleotide sequence that is not complementary to a 3′ splice site of an intron sequence that is upstream of an ASCE (e.g., exon 38 of PKD1 (e.g., exon (GRCh38/hg38: chr16 2092954 2093093) of PKD1), e.g., exon 3 of ABCA4 (e.g., exon (GRCh38/hg38: chr1 94111438 94111579) of ABCA4), e.g., exon 7 of FUS (e.g., exon (GRCh38/hg38: chr16 31186802 31186836) of FUS), e.g., exon 5 of CEL (e.g., exon (GRCh38/hg38: chr9 133066530 133066660) of CEL), e.g., exon 8 of NSD1 (e.g., exon (GRCh38/hg38: chr5 177238237 177238507)) of NSD1). For example, a modified snRNA can be modified to comprise a single-stranded nucleotide sequence that is not complementary to a 5′ splice site of an intron sequence that is upstream of an ASCE (e.g., exon 38 of PKD1 (e.g., exon (GRCh38/hg38: chr16 2092954 2093093) of PKD1), e.g., exon 3 of ABCA4 (e.g., exon (GRCh38/hg38: chr1 94111438 94111579) of ABCA4), e.g., exon 7 of FUS (e.g., exon (GRCh38/hg38: chr16 31186802 31186836) of FUS), e.g., exon 5 of CEL (e.g., exon (GRCh38/hg38: chr9 133066530 133066660) of CEL), e.g., exon 8 of NSD1 (e.g., exon (GRCh38/hg38: chr5 177238237 177238507)) of NSD1).

Methods of Identifying Additional ASOs that Promote Splicing at a Canonical 3′ Splice Site and/or to Promote Splicing at a Canonical 5′ Splice Site

[0229] Also within the scope of the present disclosure are methods for identifying or determining therapeutic agents, such as ASOs, that promote splicing at a canonical 3′ splice site of an ASCE, that promote splicing at a canonical 3′ splice site of the intron upstream of an ASCE, that promote splicing at a canonical 5′ splice site of an ASCE and/or that promote splicing at a canonical 5′ splice site of the intron downstream of an ASCE of an ASCE-containing pre-mRNA, such as a PKD1, ABCA4, FUS, CEL or NSD1 ASCE-containing pre-mRNA. For example, a method can comprise identifying or determining ASOs that inhibit or reduce ASCE skipping of an ASCE-containing pre-mRNA, such as a PKD1, ABCA4, FUS, CEL or NSD1 ASCE-containing pre-mRNA. ASOs that specifically hybridize to different nucleotides within the target region of the pre-mRNA may be screened to identify or determine ASOs that improve the rate and/or extent of splicing at a canonical 3′ splice site of an ASCE, a canonical 3′ splice site of the intron upstream of an ASCE, a canonical 5′ splice site of an ASCE and/or that a canonical 5′ splice site of the intron downstream of an ASCE, and/or reduce the rate and/or extent of splicing at an alternative 3′ splice site and/or alternative 5′ splice site of an ASCE. In some embodiments, the ASO may block or interfere with the binding site(s) of a splicing repressor(s)/silencer. Any method known in the art may be used to identify (determine) an ASO that when hybridized to the target region results in the desired effect (e.g., promoting splicing at a canonical 3′ splice site of an ASCE, promoting splicing at a canonical 3′ splice site of the intron upstream of an ASCE, promoting splicing at a canonical 5′ splice site of an ASCE, promoting splicing at a canonical 5′ splice site of the intron downstream of an ASCE, protein production, or functional RNA production). These methods also can be used for identifying ASOs that promote or increase inclusion of an ASCE by binding to a target region flanking the ASCE, or in the ASCE. An example of a method that may be used is provided below.

[0230] A round of screening, referred to as an ASO “walk” may be performed using ASOs that have been designed to hybridize to a target region of a pre-mRNA. For example, the ASOs used in the ASO walk can be tiled every 5 nucleotides from approximately 100 nucleotides upstream of the 3′ or 5′ splice site of the ASCE to approximately 100 nucleotides downstream of the 3′ or 5′ splice site of the ASCE. For example, the ASOs used in the ASO walk can be tiled every 5 nucleotides from approximately 100 nucleotides upstream of the 5′ splice site of the intron following the ASCE to approximately 100 nucleotides downstream of the 3′ splice site of the intron following the ASCE. For example, the ASOs used in the ASO walk can be tiled every 5 nucleotides from approximately 100 nucleotides upstream of the 3′ splice site of the intron preceding the ASCE to approximately 100 nucleotides downstream of the 5′ splice site of the intron preceding the ASCE. For example, the ASOs used in the ASO walk can be tiled every 5 nucleotides from approximately 100 nucleotides upstream of the 5′ splice site of the intron following the ASCE to approximately 100 nucleotides downstream of the 5′ splice site of the intron following the ASCE. For example, the ASOs used in the ASO walk can be tiled every 5 nucleotides from approximately 100 nucleotides upstream of the 3′ splice site of the intron following the ASCE to approximately 100 nucleotides downstream of the 3′ splice site of the intron following the ASCE. For example, the ASOs used in the ASO walk can be tiled every 5 nucleotides from approximately 100 nucleotides upstream of the 3′ splice site of the intron preceding the ASCE to approximately 100 nucleotides downstream of the 3′ splice site of the intron preceding the ASCE. For example, the ASOs used in the ASO walk can be tiled every 5 nucleotides from approximately 100 nucleotides upstream of the 5′ splice site of the intron preceding the ASCE to approximately 100 nucleotides downstream of the 5′ splice site of the intron preceding the ASCE. For example, the ASOs used in the ASO walk can be tiled every 5 nucleotides from approximately 100 nucleotides upstream of the 3′ or 5′ splice site of the ASCE to approximately 100 nucleotides downstream of the 3′ or 5′ splice site of the ASCE. For example, a first ASO of 15 nucleotides in length may be designed to specifically hybridize to nucleotides +6 to +20 relative to the 3′ splice site of the intron preceding of the ASCE. A second ASO may be designed to specifically hybridize to nucleotides +11 to +25 relative to the 3′ splice site of the intron preceding the ASCE. ASOs are designed as such spanning the target region of the pre-mRNA. In embodiments, the ASOs can be tiled more closely, e.g., every 1, 7, 8, or 9 nucleotides. Further, the ASOs can be tiled from 100 nucleotides downstream of the 5′ splice site, to 100 nucleotides upstream of the 3′ splice site. In some embodiments, the ASOs can be tiled from about 500 nucleotides upstream of the 3′ splice site, to about 500 nucleotides downstream of the 5′ splice site. In some embodiments, the ASOs can be tiled from about 500 nucleotides upstream of the 3′ splice site, to about 500 nucleotides downstream of the 3′ splice site.

[0231] One or more ASOs, or a control ASO (an ASO with a scrambled sequence, sequence that is not expected to hybridize to the target region) can be delivered, for example by transfection, into a disease-relevant cell line that expresses the target pre-mRNA (e.g., a ASCE-containing pre-mRNA described herein). The exon skipping inhibition or ASCE inclusion promotion effects of each of the ASOs may be assessed by any method known in the art, for example by reverse transcriptase (RT)-PCR using primers that span the splice junction. An increase or presence of a longer RT-PCR product produced using the primers spanning the region containing the ASCE (e.g., including the exons flanking the ASCE) in ASO-treated cells as compared to in control ASO-treated cells indicates that splicing out of the target ASCE has been inhibited. In some embodiments, the exon skipping inhibition efficiency, the ratio of unspliced to spliced pre-mRNA, the decrease in rate of splicing, or the reduction in extent of splicing may be improved using the ASOs described herein. The amount of protein or functional RNA that is encoded by the target pre-mRNA can also be assessed to determine whether each ASO achieved the desired effect (e.g., enhanced functional protein production). Any method known in the art for assessing and/or quantifying protein production, such as Western blotting, flow cytometry, immunofluorescence microscopy, and ELISA, can be used.

[0232] A second round of screening, referred to as an ASO “micro-walk” may be performed using ASOs that have been designed to hybridize to a target region of a pre-mRNA. The ASOs used in the ASO micro-walk are tiled every 1 nucleotide to further refine the nucleotide acid sequence of the pre-mRNA that when hybridized with an ASO results in promotion of inclusion of an ASCE in a mature RNA transcript, and/or inhibition or reduction of skipping of an ASCE from an ASCE-containing pre-mRNA transcript.

[0233] Regions defined by ASOs that promote inclusion of an ASCE in a mature RNA transcript are explored in greater detail by means of an ASO “micro-walk,” involving ASOs spaced in 1-nt steps, as well as longer ASOs, typically 18-25 nt.

[0234] As described for the ASO walk above, the ASO micro-walk is performed by delivering one or more ASOs, or a control ASO (an ASO with a scrambled sequence, sequence that is not expected to hybridize to the target region), for example by transfection, into a disease-relevant cell line that expresses the target pre-mRNA. The splicing-inducing effects of each of the ASOs may be assessed by any method known in the art, for example by reverse transcriptase (RT)-PCR using primers that span the ASCE, as described herein. An increase or presence of a longer RT-PCR product produced using the primers spanning the region containing the ASCE (e.g., including the exons flanking the ASCE) in ASO-treated cells as compared to in control ASO-treated cells indicates that splicing out of the target ASCE has been inhibited. In some embodiments, the exon skipping inhibition efficiency, the ratio of unspliced to spliced pre-mRNA, the decrease in rate of splicing, or the reduction in extent of splicing may be improved using the ASOs described herein. The amount of protein or functional RNA that is encoded by the target pre-mRNA can also be assessed to determine whether each ASO achieved the desired effect (e.g., enhanced functional protein production). Any method known in the art for assessing and/or quantifying protein production, such as Western blotting, flow cytometry, immunofluorescence microscopy, and ELISA, can be used.

[0235] ASOs that when hybridized to a region of a pre-mRNA result in promotion of inclusion of an ASCE in a mature RNA transcript, and/or inhibition or reduction of skipping of an ASCE from an ASCE-containing pre-mRNA transcript, and increased protein production may be tested in vivo using animal models, for example transgenic mouse models in which the full-length human gene has been knocked-in or in humanized mouse models of disease. Suitable routes for administration of ASOs may vary depending on the disease and/or the cell types to which delivery of the ASOs is desired. ASOs may be administered, for example, by intrathecal injection, intracerebroventricular injection, intraperitoneal injection, intramuscular injection, subcutaneous injection, or intravenous injection. Following administration, the cells, tissues, and/or organs of the model animals may be assessed to determine the effect of the ASO treatment by for example evaluating splicing (e.g., efficiency, rate, extent) and protein production by methods known in the art and described herein. The animal models may also be any phenotypic or behavioral indication of the disease or disease severity.

[0236] Also within the scope of the present disclosure is a method to identify or validate an ASCE in the presence of an NMD inhibitor, for example, cycloheximide. An exemplary method is provided in Example 2.

[0237] Exemplary genes encoding ASCE-containing pre-mRNAs and ASCE sequences are summarized in Table 1 and Table 2 (SEQ ID NOS indicate the corresponding nucleotide sequences represented by the Gene ID Nos (NCBI Entrez Gene No.). Sequences of exemplary target sequences in pre-mRNA transcripts are shown in Table 3. Exemplary ASO sequences are shown in Table 4.

TABLE 1
List of Exemplary Target Genes Encoding ASCE-Containing Pre-mRNAs

| | | NMD | | | Human | CHX |
|---|---|---|---|---|---|---|
| Gene | | Event | | | tissue event | responsiveness |
| Symbol | Disease | type | Event | Organ | abundance | in vitro |
| PKD1 | PKD | Exon | chr16 | Kidney | 5.5% | 2-3X (PCR) |
| | | skipping | 2092954 | | | |
| | | | 2093093 | | | |
| ABCA4 | Age-related | Exon | chr1 | Ocular | 9.6% | 18X |
| | macular | skipping | 94111438 | | (40/53) | |
| | degeneration-2 | | 94111579 | | | |
| FUS | ALS/FTD | Exon | chr16 | CNS | 5.9% | 1.9-9.1X |
| | | skipping | 31186802 | | (15/52) | |
| | | | 31186836 | | | |
| CEL | MODY 8 | Exon | chr9 | Pancreas | No pancreas | 1.5X |
| | (<1% of MODY, | skipping | 133066530 | | data | |
| | MODY 1:1000) | | 133066660 | | | |
| NSD1 | Sotos syndrome | Exon | chr5 | CNS | 12.6% | 2-11X |
| | (1:10,000- | skipping | 177238237 | | (22/52) | |
| | 14,000) | | 177238507 | | | |

TABLE 2
List of Exemplary Gene and ASCE Sequences

| | Gene | | | | | |
|---|---|---|---|---|---|---|
| Gene | ID | | | | | ASCE |
| Symbol | No. | SEQ ID NO. | Disease | OMIM | Genetics | Sequences |
| PKD1 | 5310 | chr16: 2088708-2135898 | PKD | 601313 | Autosomal | chr16 |
| | | (GRCh38/hg38) | | | dominant | 2092954 |
| | | Size: 47,191 bases | | | | 2093093 |
| | | Orientation: Minus strand | | | | |
| ABCA4 | 24 | chr1: 93992834-94121148 | Age-related | 601691 | Autosomal | chr1 |
| | | (GRCh38/hg38) | macular | | dominant | 94111438 |
| | | Size: 128,315 bases | degeneration- | | | 94111579 |
| | | Orientation: Minus strand | 2 | | | |
| FUS | 2521 | chr16: 31180110-31194871 | ALS/FTD | 137070 | Autosomal | chr16 |
| | | (GRCh38/hg38) | | | dominant | 31186802 |
| | | Size: 14,762 bases | | | | 31186836 |
| | | Orientation: Plus strand | | | | |
| CEL | 1056 | chr9: 133061981- | MODY 8 | 114840 | Autosomal | chr9 |
| | | 133071861 | | | dominant | 133066530 |
| | | (GRCh38/hg38) | | | | 133066660 |
| | | Size: 9,881 bases | | | | |
| | | Orientation: Plus strand | | | | |
| NSD1 | 64324 | chr5: 177131835- | Sotos | 606681 | Autosomal | chr5 |
| | | 177300213 | syndrome | | dominant | 177238237 |
| | | (GRCh38/hg38) | | | | 177238507 |
| | | Size: 168,379 bases | | | | |
| | | Orientation: Plus strand | | | | |

TABLE 3
Sequences of Exemplary Target Sequences in Human Pre-mRNA Transcripts.

| Gene/pre- | | | |
|---|---|---|---|
| mRNA | | | |
| symbol | Gene | Pre-mRNA | Sequence of ASCE |
| PKD1 | ENSG00000008710 | ENST00000262304.8 | chr16 |
| | (SEQ ID NO: 1) | | 2092954 2093093 |
| ABCA4 | ENSG00000198691 | ENST00000370225.4 | chr1 |
| | (SEQ ID NO: 2) | | 94111438 94111579 |
| FUS | ENSG00000089280 | ENST00000254108.11 | chr16 |
| | (SEQ ID NO: 3) | | 31186802 31186836 |
| CEL | ENSG00000170835 | ENST00000372080.6 | chr9 |
| | (SEQ ID NO: 4) | | 133066530 133066660 |
| NSD1 | ENSG00000165671 | ENST00000354179.8 | chr5 |
| | (SEQ ID NO: 5) | | 177238237 177238507 |

TABLE 4
Exemplary ASO Sequences

| | | | | Oligo Start | Oligo End | | ASO |
|---|---|---|---|---|---|---|---|
| | | | | (Chr | Chr | | SEQ ID |
| Event | Sequence | Chr | Strand | coordinate) | coordinate) | Oligo Names | NO: |
| Exon | ACAAAGGCT | chr5 | + | 177238123 | 177238141 | NSD1:NM_ | 16 |
| skipping | ACAAAAAGT | | | | | 172349:IVS7:−96 | |
| Exon | TTCTGACAA | chr5 | + | 177238128 | 177238146 | NSD1:NM_ | 17 |
| skipping | AGGCTACAA | | | | | 172349:IVS7:−91 | |
| Exon | TGAAATTCT | chr5 | + | 177238133 | 177238151 | NSD1:NM_ | 18 |
| skipping | GACAAAGGC | | | | | 172349:IVS7:−86 | |
| Exon | AGGAATGAA | chr5 | + | 177238138 | 177238156 | NSD1:NM_ | 19 |
| skipping | ATTCTGACA | | | | | 172349:IVS7:−81 | |
| Exon | TTAAAAGGA | chr5 | + | 177238143 | 177238161 | NSD1:NM_ | 20 |
| skipping | ATGAAATTC | | | | | 172349:IVS7:−76 | |
| Exon | ACACTTTAA | chr5 | + | 177238148 | 177238166 | NSD1:NM_ | 21 |
| skipping | AAGGAATGA | | | | | 172349:IVS7:−71 | |
| Exon | ATAACACAC | chr5 | + | 177238153 | 177238171 | NSD1:NM_ | 22 |
| skipping | TTTAAAAGG | | | | | 172349:IVS7:−66 | |
| Exon | AAAGAATAA | chr5 | + | 177238158 | 177238176 | NSD1:NM_ | 23 |
| skipping | CACACTTTA | | | | | 172349:IVS7:−61 | |
| Exon | GTCAAAAAG | chr5 | + | 177238163 | 177238181 | NSD1:NM_ | 24 |
| skipping | AATAACACA | | | | | 172349:IVS7:−56 | |
| Exon | TAAGTGTCA | chr5 | + | 177238168 | 177238186 | NSD1:NM_ | 25 |
| skipping | AAAAGAATA | | | | | 172349:IVS7:−51 | |
| Exon | TAATTTAAG | chr5 | + | 177238173 | 177238191 | NSD1:NM_ | 26 |
| skipping | TGTCAAAAA | | | | | 172349:IVS7:−46 | |
| Exon | TGTTGTAAT | chr5 | + | 177238178 | 177238196 | NSD1:NM_ | 27 |
| skipping | TTAAGTGTC | | | | | 172349:IVS7:−41 | |
| Exon | AAAATTGTT | chr5 | + | 177238183 | 177238201 | NSD1:NM_ | 28 |
| skipping | GTAATTTAA | | | | | 172349:IVS7:−36 | |
| Exon | AGGCCAAAA | chr5 | + | 177238188 | 177238206 | NSD1:NM_ | 29 |
| skipping | TTGTTGTAA | | | | | 172349:IVS7:−31 | |
| Exon | TCCACAGGC | chr5 | + | 177238193 | 177238211 | NSD1:NM_ | 30 |
| skipping | CAAAATTGT | | | | | 172349:IVS7:−26 | |
| Exon | TAGAGTCCA | chr5 | + | 177238198 | 177238216 | NSD1:NM_ | 31 |
| skipping | CAGGCCAAA | | | | | 172349:IVS7:−21 | |
| Exon | AAAAATAGA | chr5 | + | 177238203 | 177238221 | NSD1:NM_ | 32 |
| skipping | GTCCACAGG | | | | | 172349:IVS7:−16 | |
| Exon | CTTCACAGC | chr5 | + | 177238237 | 177238255 | NSD1:NM_ | 33 |
| skipping | GGGAACTTA | | | | | 172349:EX8:+2 | |
| Exon | TTCCTCTTCA | chr5 | + | 177238242 | 177238260 | NSD1:NM_ | 34 |
| skipping | CAGCGGGA | | | | | 172349:EX8:+7 | |
| Exon | AGGCTTTCC | chr5 | + | 177238247 | 177238265 | NSD1:NM_ | 35 |
| skipping | TCTTCACAG | | | | | 172349:EX8:+12 | |
| Exon | CTAGAAGGC | chr5 | + | 177238252 | 177238270 | NSD1:NM_ | 36 |
| skipping | TTTCCTCTT | | | | | 172349:EX8:+17 | |
| Exon | TCGGGCTAG | chr5 | + | 177238257 | 177238275 | NSD1:NM_ | 37 |
| skipping | AAGGCTTTC | | | | | 172349:EX8:+22 | |
| Exon | CGACCTCGG | chr5 | + | 177238262 | 177238280 | NSD1:NM_ | 38 |
| skipping | GCTAGAAGG | | | | | 172349:EX8:+27 | |
| Exon | TAGATCGAC | chr5 | + | 177238267 | 177238285 | NSD1:NM_ | 39 |
| skipping | CTCGGGCTA | | | | | 172349:EX8:+32 | |
| Exon | AGCACTAGA | chr5 | + | 177238272 | 177238290 | NSD1:NM_ | 40 |
| skipping | TCGACCTCG | | | | | 172349:EX8:+37 | |
| Exon | TTCTGAGCA | chr5 | + | 177238277 | 177238295 | NSD1:NM_ | 41 |
| skipping | CTAGATCGA | | | | | 172349:EX8:+42 | |
| Exon | GCTTGTTCT | chr5 | + | 177238282 | 177238300 | NSD1:NM_ | 42 |
| skipping | GAGCACTAG | | | | | 172349:EX8:+47 | |
| Exon | CACCTGCTT | chr5 | + | 177238287 | 177238305 | NSD1:NM_ | 43 |
| skipping | GTTCTGAGC | | | | | 172349:EX8:+52 | |
| Exon | TCGTCCACC | chr5 | + | 177238292 | 177238310 | NSD1:NM_ | 44 |
| skipping | TGCTTGTTC | | | | | 172349:EX8:+57 | |
| Exon | AATTCTCGT | chr5 | + | 177238297 | 177238315 | NSD1:NM_ | 45 |
| skipping | CCACCTGCT | | | | | 172349:EX8:+62 | |
| Exon | CAAAGAATT | chr5 | + | 177238302 | 177238320 | NSD1:NM_ | 46 |
| skipping | CTCGTCCAC | | | | | 172349:EX8:+67 | |
| Exon | GAAATCAAA | chr5 | + | 177238307 | 177238325 | NSD1:NM_ | 47 |
| skipping | GAATTCTCG | | | | | 172349:EX8:+72 | |
| Exon | TGGTTGAAA | chr5 | + | 177238312 | 177238330 | NSD1:NM_ | 48 |
| skipping | TCAAAGAAT | | | | | 172349:EX8:+77 | |
| Exon | TTCTTTGGTT | chr5 | + | 177238317 | 177238335 | NSD1:NM_ | 49 |
| skipping | GAAATCAA | | | | | 172349:EX8:+82 | |
| Exon | GGCTCTTCT | chr5 | + | 177238322 | 177238340 | NSD1:NM_ | 50 |
| skipping | TTGGTTGAA | | | | | 172349:EX8:+87 | |
| Exon | CTGGAGGCT | chr5 | + | 177238327 | 177238345 | NSD1:NM_ | 51 |
| skipping | CTTCTTTGG | | | | | 172349:EX8:+92 | |
| Exon | AAGAACTGG | chr5 | + | 177238332 | 177238350 | NSD1:NM_ | 52 |
| skipping | AGGCTCTTC | | | | | 172349:EX8:+97 | |
| Exon | CTTTCAAGA | chr5 | + | 177238337 | 177238355 | NSD1:NM_ | 53 |
| skipping | ACTGGAGGC | | | | | 172349:EX8:+102 | |
| Exon | CCTCCCTTTC | chr5 | + | 177238342 | 177238360 | NSD1:NM_ | 54 |
| skipping | AAGAACTG | | | | | 172349:EX8:+107 | |
| Exon | CGGAGCCTC | chr5 | + | 177238347 | 177238365 | NSD1:NM_ | 55 |
| skipping | CCTTTCAAG | | | | | 172349:EX8:+112 | |
| Exon | AAAAACGGA | chr5 | + | 177238352 | 177238370 | NSD1:NM_ | 56 |
| skipping | GCCTCCCTT | | | | | 172349:EX8:+117 | |
| Exon | CCTCCAAAA | chr5 | + | 177238357 | 177238375 | NSD1:NM_ | 57 |
| skipping | ACGGAGCCT | | | | | 172349:EX8:+122 | |
| Exon | GGGGCCCTC | chr5 | + | 177238362 | 177238380 | NSD1:NM_ | 58 |
| skipping | CAAAAACGG | | | | | 172349:EX8:+127 | |
| Exon | GCCAAGGGG | chr5 | + | 177238367 | 177238385 | NSD1:NM_ | 59 |
| skipping | CCCTCCAAA | | | | | 172349:EX8:+132 | |
| Exon | ACTGAGCCA | chr5 | + | 177238372 | 177238390 | NSD1:NM_ | 60 |
| skipping | AGGGGCCCT | | | | | 172349:EX8:−118 | |
| Exon | TTCTGACTG | chr5 | + | 177238377 | 177238395 | NSD1:NM_ | 61 |
| skipping | AGCCAAGGG | | | | | 172349:EX8:−113 | |
| Exon | CCAAGTTCT | chr5 | + | 177238382 | 177238400 | NSD1:NM_ | 62 |
| skipping | GACTGAGCC | | | | | 172349:EX8:−108 | |
| Exon | CACCTCCAA | chr5 | + | 177238387 | 177238405 | NSD1:NM_ | 63 |
| skipping | GTTCTGACT | | | | | 172349:EX8:−103 | |
| Exon | ATGTCCACC | chr5 | + | 177238392 | 177238410 | NSD1:NM_ | 64 |
| skipping | TCCAAGTTC | | | | | 172349:EX8:−98 | |
| Exon | TCAGCATGT | chr5 | + | 177238397 | 177238415 | NSD1:NM_ | 65 |
| skipping | CCACCTCCA | | | | | 172349:EX8:−93 | |
| Exon | GCAACTCAG | chr5 | + | 177238402 | 177238420 | NSD1:NM_ | 66 |
| skipping | CATGTCCAC | | | | | 172349:EX8:−88 | |
| Exon | CTGCGGCAA | chr5 | + | 177238407 | 177238425 | NSD1:NM_ | 67 |
| skipping | CTCAGCATG | | | | | 172349:EX8:−83 | |
| Exon | GTCAGCTGC | chr5 | + | 177238412 | 177238430 | NSD1:NM_ | 68 |
| skipping | GGCAACTCA | | | | | 172349:EX8:−78 | |
| Exon | ACAAGGTCA | chr5 | + | 177238417 | 177238435 | NSD1:NM_ | 69 |
| skipping | GCTGCGGCA | | | | | 172349:EX8:−73 | |
| Exon | CACAGACAA | chr5 | + | 177238422 | 177238440 | NSD1:NM | 70 |
| skipping | GGTCAGCTG | | | | | 172349:EX8:−68 | |
| Exon | ACAGGCACA | chr5 | + | 177238427 | 177238445 | NSD1:NM_ | 71 |
| skipping | GACAAGGTC | | | | | 172349:EX8:−63 | |
| Exon | GAGCCACAG | chr5 | + | 177238432 | 177238450 | NSD1:NM_ | 72 |
| skipping | GCACAGACA | | | | | 172349:EX8:−58 | |
| Exon | TTCCGGAGC | chr5 | + | 177238437 | 177238455 | NSD1:NM_ | 73 |
| skipping | CACAGGCAC | | | | | 172349:EX8:−53 | |
| Exon | GAGACTTCC | chr5 | + | 177238442 | 177238460 | NSD1:NM_ | 74 |
| skipping | GGAGCCACA | | | | | 172349:EX8:−48 | |
| Exon | GTGGAGAGA | chr5 | + | 177238447 | 177238465 | NSD1:NM_ | 75 |
| skipping | CTTCCGGAG | | | | | 172349:EX8:−43 | |
| Exon | AGGCCGTGG | chr5 | + | 177238452 | 177238470 | NSD1:NM_ | 76 |
| skipping | AGAGACTTC | | | | | 172349:EX8:−38 | |
| Exon | AGGGCAGGC | chr5 | + | 177238457 | 177238475 | NSD1:NM_ | 77 |
| skipping | CGTGGAGAG | | | | | 172349:EX8:−33 | |
| Exon | ACTCAAGGG | chr5 | + | 177238462 | 177238480 | NSD1:NM_ | 78 |
| skipping | CAGGCCGTG | | | | | 172349:EX8:−28 | |
| Exon | CTCAGACTC | chr5 | + | 177238467 | 177238485 | NSD1:NM_ | 79 |
| skipping | AAGGGCAGG | | | | | 172349:EX8:−23 | |
| Exon | AATTCCTCA | chr5 | + | 177238472 | 177238490 | NSD1:NM_ | 80 |
| skipping | GACTCAAGG | | | | | 172349:EX8:−18 | |
| Exon | CTAGCAATT | chr5 | + | 177238477 | 177238495 | NSD1:NM_ | 81 |
| skipping | CCTCAGACT | | | | | 172349:EX8:−13 | |
| Exon | TTTAACTAG | chr5 | + | 177238482 | 177238500 | NSD1:NM_ | 82 |
| skipping | CAATTCCTC | | | | | 172349:EX8:−8 | |
| Exon | GGCGTTTTA | chr5 | + | 177238487 | 177238505 | NSD1:NM_ | 83 |
| skipping | ACTAGCAAT | | | | | 172349:EX8:−3 | |
| Exon | CTGAGACCC | chr5 | + | 177238512 | 177238530 | NSD1:NM_ | 84 |
| skipping | CAACCCCAC | | | | | 172349:IVS8:+6 | |
| Exon | AAATACTGA | chr5 | + | 177238517 | 177238535 | NSD1:NM_ | 85 |
| skipping | GACCCCAAC | | | | | 172349:IVS8:+11 | |
| Exon | TGCTCAAAT | chr5 | + | 177238522 | 177238540 | NSD1:NM_ | 86 |
| skipping | ACTGAGACC | | | | | 172349:IVS8:+16 | |
| Exon | ATATCTGCT | chr5 | + | 177238527 | 177238545 | NSD1:NM_ | 87 |
| skipping | CAAATACTG | | | | | 172349:IVS8:+21 | |
| Exon | TAATCATAT | chr5 | + | 177238532 | 177238550 | NSD1:NM_ | 88 |
| skipping | CTGCTCAAA | | | | | 172349:IVS8:+26 | |
| Exon | TCCTCTAAT | chr5 | + | 177238537 | 177238555 | NSD1:NM_ | 89 |
| skipping | CATATCTGC | | | | | 172349:IVS8:+31 | |
| Exon | CTGCTTCCT | chr5 | + | 177238542 | 177238560 | NSD1:NM_ | 90 |
| skipping | CTAATCATA | | | | | 172349:IVS8:+36 | |
| Exon | ATCTCCTGC | chr5 | + | 177238547 | 177238565 | NSD1:NM_ | 91 |
| skipping | TTCCTCTAA | | | | | 172349:IVS8:+41 | |
| Exon | CTAAAATCT | chr5 | + | 177238552 | 177238570 | NSD1:NM_ | 92 |
| skipping | CCTGCTTCC | | | | | 172349:IVS8:+46 | |
| Exon | ACATACTAA | chr5 | + | 177238557 | 177238575 | NSD1:NM_ | 93 |
| skipping | AATCTCCTG | | | | | 172349:IVS8:+51 | |
| Exon | TCAAAACAT | chr5 | + | 177238562 | 177238580 | NSD1:NM_ | 94 |
| skipping | ACTAAAATC | | | | | 172349:IVS8:+56 | |
| Exon | TTACATCAA | chr5 | + | 177238567 | 177238585 | NSD1:NM_ | 95 |
| skipping | AACATACTA | | | | | 172349:IVS8:+61 | |
| Exon | TGGCTTTAC | chr5 | + | 177238572 | 177238590 | NSD1:NM_ | 96 |
| skipping | ATCAAAACA | | | | | 172349:IVS8:+66 | |
| Exon | AATGTTGGC | chr5 | + | 177238577 | 177238595 | NSD1:NM_ | 97 |
| skipping | TTTACATCA | | | | | 172349:IVS8:+71 | |
| Exon | GATACAATG | chr5 | + | 177238582 | 177238600 | NSD1:NM_ | 98 |
| skipping | TTGGCTTTA | | | | | 172349:IVS8:+76 | |
| Exon | ATATAGATA | chr5 | + | 177238587 | 177238605 | NSD1:NM_ | 99 |
| skipping | CAATGTTGG | | | | | 172349:IVS8:+81 | |
| Exon | ATTGTATAT | chr5 | + | 177238592 | 177238610 | NSD1:NM_ | 100 |
| skipping | AGATACAAT | | | | | 172349:IVS8:+86 | |
| Exon | AGTTTATTG | chr5 | + | 177238597 | 177238615 | NSD1:NM_ | 101 |
| skipping | TATATAGAT | | | | | 172349:IVS8:+91 | |
| Exon | GGGGTAGTT | chr5 | + | 177238602 | 177238620 | NSD1:NM_ | 102 |
| skipping | TATTGTATA | | | | | 172349:IVS8:+96 | |
| Exon | AGTCCACAG | chr5 | + | 177238195 | 177238213 | NSD1:NM_ | 103 |
| skipping | GCCAAAATT | | | | | 172349:IVS7:−24 | |
| Exon | GAGTCCACA | chr5 | + | 177238196 | 177238214 | NSD1:NM_ | 104 |
| skipping | GGCCAAAAT | | | | | 172349:IVS7:−23 | |
| Exon | AGAGTCCAC | chr5 | + | 177238197 | 177238215 | NSD1:NM_ | 105 |
| skipping | AGGCCAAAA | | | | | 172349:IVS7:−22 | |
| Exon | ATAGAGTCC | chr5 | + | 177238199 | 177238217 | NSD1:NM_ | 106 |
| skipping | ACAGGCCAA | | | | | 172349:IVS7:−20 | |
| Exon | AATAGAGTC | chr5 | + | 177238200 | 177238218 | NSD1:NM_ | 107 |
| skipping | CACAGGCCA | | | | | 172349:IVS7:−19 | |
| Exon | AAATAGAGT | chr5 | + | 177238201 | 177238219 | NSD1:NM_ | 108 |
| skipping | CCACAGGCC | | | | | 172349:IVS7:−18 | |
| Exon | AAAATAGAG | chr5 | + | 177238202 | 177238220 | NSD1:NM_ | 109 |
| skipping | TCCACAGGC | | | | | 172349:IVS7:−17 | |

TABLE 5A
Exemplary ASO Sequences

| | | | | | SEQ | |
|---|---|---|---|---|---|---|
| chr | | | | | ID | |
| # | Start | End | Name | Strand | NO: | ASO sequence |
| chr5 | 177238119 | 177238137 | NSD1:NM_ | + | 322 | AGGCTACAAAAAGTGGAT |
| | | | 001365684:U7: | | | |
| | | | IVS7:−100 | | | |
| chr5 | 177238124 | 177238142 | NSD1:NM_ | + | 323 | GACAAAGGCTACAAAAAG |
| | | | 001365684:U7: | | | |
| | | | IVS7:−95 | | | |
| chr5 | 177238129 | 177238147 | NSD1:NM_ | + | 324 | ATTCTGACAAAGGCTACA |
| | | | 001365684:U7: | | | |
| | | | IVS7:−90 | | | |
| chr5 | 177238134 | 177238152 | NSD1:NM_ | + | 325 | ATGAAATTCTGACAAAGG |
| | | | 001365684:U7: | | | |
| | | | IVS7:−85 | | | |
| chr5 | 177238139 | 177238157 | NSD1:NM_ | + | 326 | AAGGAATGAAATTCTGAC |
| | | | 001365684:U7: | | | |
| | | | IVS7:−80 | | | |
| chr5 | 177238144 | 177238162 | NSD1:NM_ | + | 327 | TTTAAAAGGAATGAAATT |
| | | | 001365684:U7: | | | |
| | | | IVS7:−75 | | | |
| chr5 | 177238149 | 177238167 | NSD1:NM_ | + | 328 | CACACTTTAAAAGGAATG |
| | | | 001365684:U7: | | | |
| | | | IVS7:−70 | | | |
| chr5 | 177238154 | 177238172 | NSD1:NM_ | + | 329 | AATAACACACTTTAAAAG |
| | | | 001365684:U7: | | | |
| | | | IVS7:−65 | | | |
| chr5 | 177238159 | 177238177 | NSD1:NM_ | + | 330 | AAAAGAATAACACACTTT |
| | | | 001365684:U7: | | | |
| | | | VIS7:−60 | | | |
| chr5 | 177238164 | 177238182 | NSD1:NM_ | + | 331 | TGTCAAAAAGAATAACAC |
| | | | 001365684:U7: | | | |
| | | | IVS7:−55 | | | |
| chr5 | 177238169 | 177238187 | NSD1:NM_ | + | 332 | TTAAGTGTCAAAAAGAAT |
| | | | 001365684:U7: | | | |
| | | | IVS7:−50 | | | |
| chr5 | 177238174 | 177238192 | NSD1:NM_ | + | 333 | GTAATTTAAGTGTCAAAA |
| | | | 001365684:U7: | | | |
| | | | IVS7:−45 | | | |
| chr5 | 177238179 | 177238197 | NSD1:NM_ | + | 334 | TTGTTGTAATTTAAGTGT |
| | | | 001365684:U7: | | | |
| | | | IVS7:−40 | | | |
| chr5 | 177238184 | 177238202 | NSD1:NM_ | + | 335 | CAAAATTGTTGTAATTTA |
| | | | 001365684:U7: | | | |
| | | | IVS7:−35 | | | |
| chr5 | 177238189 | 177238207 | NSD1:NM_ | + | 336 | CAGGCCAAAATTGTTGTA |
| | | | 001365684:U7: | | | |
| | | | IVS7:−30 | | | |
| chr5 | 177238194 | 177238212 | NSD1:NM_ | + | 337 | GTCCACAGGCCAAAATTG |
| | | | 001365684:U7: | | | |
| | | | IVS7:−25 | | | |
| chr5 | 177238199 | 177238217 | NSD1:NM_ | + | 338 | ATAGAGTCCACAGGCCAA |
| | | | 001365684:U7: | | | |
| | | | IVS7:−20 | | | |
| chr5 | 177238237 | 177238255 | NSD1:NM_ | + | 339 | CTTCACAGCGGGAACTTA |
| | | | 001365684:U7: | | | |
| | | | Ex8:2 | | | |
| chr5 | 177238241 | 177238259 | NSD1:NM_ | + | 340 | TCCTCTTCACAGCGGGAA |
| | | | 001365684:U7: | | | |
| | | | Ex8:6 | | | |
| chr5 | 177238246 | 177238264 | NSD1:NM_ | + | 341 | GGCTTTCCTCTTCACAGC |
| | | | 001365684:U7: | | | |
| | | | Ex8:11 | | | |
| chr5 | 177238251 | 177238269 | NSD1:NM_ | + | 342 | TAGAAGGCTTTCCTCTTC |
| | | | 001365684:U7: | | | |
| | | | Ex8:16 | | | |
| chr5 | 177238256 | 177238274 | NSD1:NM_ | + | 343 | CGGGCTAGAAGGCTTTCC |
| | | | 001365684:U7: | | | |
| | | | Ex8:21 | | | |
| chr5 | 177238261 | 177238279 | NSD1:NM_ | + | 344 | GACCTCGGGCTAGAAGGC |
| | | | 001365684:U7: | | | |
| | | | Ex8:26 | | | |
| chr5 | 177238266 | 177238284 | NSD1:NM_ | + | 345 | AGATCGACCTCGGGCTAG |
| | | | 001365684:U7: | | | |
| | | | Ex8:31 | | | |
| chr5 | 177238271 | 177238289 | NSD1:NM_ | + | 346 | GCACTAGATCGACCTCGG |
| | | | 001365684:U7: | | | |
| | | | Ex8:36 | | | |
| chr5 | 177238276 | 177238294 | NSD1:NM_ | + | 347 | TCTGAGCACTAGATCGAC |
| | | | 001365684:U7: | | | |
| | | | Ex8:41 | | | |
| chr5 | 177238281 | 177238299 | NSD1:NM_ | + | 348 | CTTGTTCTGAGCACTAGA |
| | | | 100365684:U7: | | | |
| | | | Ex8:46 | | | |
| chr5 | 177238286 | 177238304 | NSD1:NM_ | + | 349 | ACCTGCTTGTTCTGAGCA |
| | | | 001365684:U7: | | | |
| | | | Ex8:51 | | | |
| chr5 | 177238291 | 177238309 | NSD1:NM_ | + | 350 | CGTCCACCTGCTTGTTCT |
| | | | 001365684:U7: | | | |
| | | | Ex8:56 | | | |
| chr5 | 177238296 | 177238314 | NSD1:NM_ | + | 35 | ATTCTCGTCCACCTGCTT |
| | | | 001365684:U7: | | | |
| | | | Ex8:61 | | | |
| chr5 | 177238301 | 177238319 | NSD1:NM_ | + | 352 | AAAGAATTCTCGTCCACC |
| | | | 001365684:U7: | | | |
| | | | Ex8:66 | | | |
| chr5 | 177238306 | 177238324 | NSD1:NM_ | + | 353 | AAATCAAAGAATTCTCGT |
| | | | 001365684:U7: | | | |
| | | | Ex8:71 | | | |
| chr5 | 177238311 | 177238329 | NSD1:NM_ | + | 354 | GGTTGAAATCAAAGAATT |
| | | | 001365684:U7: | | | |
| | | | Ex8:76 | | | |
| chr5 | 177238316 | 177238334 | NSD1:NM_ | + | 355 | TCTTTGGTTGAAATCAAA |
| | | | 001365684:U7: | | | |
| | | | Ex8:81 | | | |
| chr5 | 177238321 | 177238339 | NSD1:NM_ | + | 356 | GCTCTTCTTTGGTTGAAA |
| | | | 001365684:U7: | | | |
| | | | Ex8:86 | | | |
| chr5 | 177238326 | 177238344 | NSD1:NM_ | + | 357 | TGGAGGCTCTTCTTTGGT |
| | | | 001365684:U7: | | | |
| | | | Ex8:91 | | | |
| chr5 | 177238331 | 177238349 | NSD1:NM_ | + | 358 | AGAACTGGAGGCTCTTCT |
| | | | 001365684:U7: | | | |
| | | | Ex8:96 | | | |
| chr5 | 177238336 | 177238354 | NSD1:NM_ | + | 359 | TTTCAAGAACTGGAGGCT |
| | | | 001365684:U7: | | | |
| | | | Ex8:101 | | | |
| chr5 | 177238341 | 177238359 | NSD1:NM_ | + | 360 | CTCCCTTTCAAGAACTGG |
| | | | 001365684:U7: | | | |
| | | | Ex8:106 | | | |
| chr5 | 177238346 | 177238364 | NSD1:NM_ | + | 361 | GGAGCCTCCCTTTCAAGA |
| | | | E001365684:U7: | | | |
| | | | x8:111 | | | |
| chr5 | 177238351 | 177238369 | NSD1:NM_ | + | 362 | AAAACGGAGCCTCCCTTT |
| | | | 001365684:U7: | | | |
| | | | Ex8:116 | | | |
| chr5 | 177238356 | 177238374 | NSD1:NM_ | + | 363 | CTCCAAAAACGGAGCCTC |
| | | | 001365684:U7: | | | |
| | | | Ex8:121 | | | |
| chr5 | 177238361 | 177238379 | NSD1:NM_ | + | 364 | GGGCCCTCCAAAAACGGA |
| | | | 001365684:U7: | | | |
| | | | Ex8:126 | | | |
| chr5 | 177238366 | 177238384 | NSD1:NM_ | + | 365 | CCAAGGGGCCCTCCAAAA |
| | | | 001365684:U7: | | | |
| | | | Ex8:131 | | | |
| chr5 | 177238371 | 177238389 | NSD1:NM_ | + | 366 | CTGAGCCAAGGGGCCCTC |
| | | | 001365684:U7: | | | |
| | | | Ex8:−119 | | | |
| chr5 | 177238376 | 177238394 | NSD1:NM_ | + | 367 | TCTGACTGAGCCAAGGGG |
| | | | 001365684:U7: | | | |
| | | | Ex8:−114 | | | |
| chr5 | 177238381 | 177238399 | NSD1:NM_ | + | 368 | CAAGTTCTGACTGAGCCA |
| | | | 001365684:U7: | | | |
| | | | Ex8:−109 | | | |
| chr5 | 177238386 | 177238404 | NSD1:NM_ | + | 369 | ACCTCCAAGTTCTGACTG |
| | | | 001365684:U7: | | | |
| | | | Ex8:−104 | | | |
| chr5 | 177238391 | 177238409 | NSD1:NM_ | + | 370 | TGTCCACCTCCAAGTTCT |
| | | | 001365684:U7: | | | |
| | | | Ex8:−99 | | | |
| chr5 | 177238396 | 177238414 | NSD1:NM_ | + | 371 | CAGCATGTCCACCTCCAA |
| | | | 001365684:U7: | | | |
| | | | Ex8:−94 | | | |
| chr5 | 177238401 | 177238419 | NSD1:NM_ | + | 372 | CAACTCAGCATGTCCACC |
| | | | 001365684:U7: | | | |
| | | | Ex8:−89 | | | |
| chr5 | 177238406 | 177238424 | NSD1:NM_ | + | 373 | TGCGGCAACTCAGCATGT |
| | | | 001365684:U7: | | | |
| | | | Ex8:−84 | | | |
| chr5 | 177238411 | 177238429 | NSD1:NM_ | + | 374 | TCAGCTGCGGCAACTCAG |
| | | | 001365684:U7: | | | |
| | | | xE8:−79 | | | |
| chr5 | 177238416 | 177238434 | NSD1:NM_ | + | 375 | CAAGGTCAGCTGCGGCAA |
| | | | 001365684:U7: | | | |
| | | | Ex8:−74 | | | |
| chr5 | 177238421 | 177238439 | NSD1:NM_ | + | 376 | ACAGACAAGGTCAGCTGC |
| | | | 001365684:U7: | | | |
| | | | Ex8:−69 | | | |
| chr5 | 177238426 | 177238444 | NSD1:NM_ | + | 377 | CAGGCACAGACAAGGTCA |
| | | | 001365684:U7: | | | |
| | | | Ex8:−64 | | | |
| chr5 | 177238431 | 177238449 | NSD1:NM_ | + | 378 | AGCCACAGGCACAGACAA |
| | | | 001365684:U7: | | | |
| | | | Ex8:−59 | | | |
| chr5 | 177238436 | 177238454 | NSD1:NM_ | + | 379 | TCCGGAGCCACAGGCACA |
| | | | 001365684:U7: | | | |
| | | | Ex8:−54 | | | |
| chr5 | 177238441 | 177238459 | NSD1:NM_ | + | 380 | AGACTTCCGGAGCCACAG |
| | | | 001365684:U7: | | | |
| | | | Ex8:−49 | | | |
| chr5 | 177238446 | 177238464 | NSD1:NM_ | + | 381 | TGGAGAGACTTCCGGAGC |
| | | | 001365684:U7: | | | |
| | | | Ex8:−44 | | | |
| chr5 | 177238451 | 177238469 | NSD1:NM_ | + | 382 | GGCCGTGGAGAGACTTCC |
| | | | 001365684:U7: | | | |
| | | | Ex8:−39 | | | |
| chr5 | 177238456 | 177238474 | NSD1:NM_ | + | 383 | GGGCAGGCCGTGGAGAGA |
| | | | 001365684:U7: | | | |
| | | | xE8:−34 | | | |
| chr5 | 177238461 | 177238479 | NSD1:NM_ | + | 384 | CTCAAGGGCAGGCCGTGG |
| | | | 100365684:U7: | | | |
| | | | Ex8:−29 | | | |
| chr5 | 177238466 | 177238484 | NSD1:NM_ | + | 385 | TCAGACTCAAGGGCAGGC |
| | | | 001365684:U7: | | | |
| | | | Ex8:−24 | | | |
| chr5 | 177238471 | 177238489 | NSD1:NM_ | + | 386 | ATTCCTCAGACTCAAGGG |
| | | | 100365684:U7: | | | |
| | | | Ex8:−19 | | | |
| chr5 | 177238476 | 177238494 | NSD1:NM_ | + | 387 | TAGCAATTCCTCAGACTC |
| | | | 100365684:U7: | | | |
| | | | Ex8:−14 | | | |
| chr5 | 177238481 | 177238499 | NSD1:NM_ | + | 388 | TAACTAGCAATTCCTCAG |
| | | | 001365684:U7: | | | |
| | | | Ex8:−9 | | | |
| chr5 | 177238514 | 177238532 | NSD1:NM_ | + | 389 | TTAACTAGCAATTCCTCA |
| | | | 001365684:U7: | | | |
| | | | IVS8:8 | | | |
| chr5 | 177238519 | 177238537 | NSD1:NM_ | + | 390 | TACTGAGACCCCAACCCC |
| | | | 001365684:U7: | | | |
| | | | VIS8:13 | | | |
| chr5 | 177238524 | 177238542 | NSD1:NM_ | + | 391 | TCAAATACTGAGACCCCA |
| | | | 100365684:U7: | | | |
| | | | IVS8:18 | | | |
| chr5 | 177238529 | 177238547 | NSD1:NM_ | + | 392 | TCTGCTCAAATACTGAGA |
| | | | 001365684:U7: | | | |
| | | | IVS8:23 | | | |
| chr5 | 177238534 | 177238552 | NSD1:NM_ | + | 393 | TCATATCTGCTCAAATAC |
| | | | 001365684:U7: | | | |
| | | | IVS8:28 | | | |
| chr5 | 177238539 | 177238557 | NSD1:NM_ | + | 394 | TCTAATCATATCTGCTCA |
| | | | 001365684:U7: | | | |
| | | | IVS8:33 | | | |
| chr5 | 177238544 | 177238562 | NSD1:NM_ | + | 395 | CTTCCTCTAATCATATCT |
| | | | 100365684:U7: | | | |
| | | | IVS8:38 | | | |
| chr5 | 177238549 | 177238567 | NSD1:NM_ | + | 396 | TCCTGCTTCCTCTAATCA |
| | | | 100365684:U7: | | | |
| | | | IVS8:43 | | | |
| chr5 | 177238554 | 177238572 | NSD1:NM_ | + | 397 | AAATCTCCTGCTTCCTCT |
| | | | 001365684:U7: | | | |
| | | | IVS8:48 | | | |
| chr5 | 177238559 | 177238577 | NSD1:NM_ | + | 398 | TACTAAAATCTCCTGCTT |
| | | | 001365684:U7: | | | |
| | | | VIS8:53 | | | |
| chr5 | 177238564 | 177238582 | NSD1:NM_ | + | 399 | AAACATACTAAAATCTCC |
| | | | 001365684:U7: | | | |
| | | | VIS8:58 | | | |
| chr5 | 177238569 | 177238587 | NSD1:NM_ | + | 400 | CATCAAAACATACTAAAA |
| | | | 001365684:U7: | | | |
| | | | VSI8:63 | | | |
| chr5 | 177238574 | 177238592 | NSD1:NM_ | + | 401 | CTTTACATCAAAACATAC |
| | | | 100365684:U7: | | | |
| | | | IVS8:68 | | | |
| chr5 | 177238579 | 177238597 | NSD1:NM_ | + | 402 | GTTGGCTTTACATCAAAA |
| | | | 001365684:U7: | | | |
| | | | VIS8:73 | | | |
| chr5 | 177238584 | 177238602 | NSD1:NM_ | + | 403 | ACAATGTTGGCTTTACAT |
| | | | 001365684:U7: | | | |
| | | | IVS8:78 | | | |
| chr5 | 177238589 | 177238607 | NSD1:NM_ | + | 404 | TAGATACAATGTTGGCTT |
| | | | 001365684:U7: | | | |
| | | | IVS8:83 | | | |
| chr5 | 177238594 | 177238612 | NSD1:NM_ | + | 405 | GTATATAGATACAATGTT |
| | | | 001365684:U7: | | | |
| | | | IVS8:88 | | | |
| chr5 | 177238599 | 177238617 | NSD1:NM_ | + | 406 | TTATTGTATATAGATACA |
| | | | 001365684:U7: | | | |
| | | | IVS8:93 | | | |
| chr5 | 177238604 | 177238622 | NSD1:NM_ | + | 407 | GTAGTTTATTGTATATAG |
| | | | 100365684:U7: | | | |
| | | | IVS8:98 | | | |
| chr5 | 177238609 | 177238627 | NSD1:NM_ | + | 408 | AGGGGGTAGTTTATTGTA |
| | | | 001365684:U7: | | | |
| | | | IVS8:103 | | | |

TABLE 5A-1
Exemplary ASO Sequences

| chr # | Start | End | Strand | SEQ ID NO: | ASO sequence |
|---|---|---|---|---|---|
| chr5 | 177238119 | 177238137 | + | 409 | AAGGCTACAAAAAGTGGAT |
| chr5 | 177238124 | 177238142 | + | 410 | AAGACAAAGGCTACAAAAAG |
| chr5 | 177238129 | 177238147 | + | 411 | AATTCTGACAAAGGCTACA |
| chr5 | 177238134 | 177238152 | + | 412 | AATGAAATTCTGACAAAGG |
| chr5 | 177238139 | 177238157 | + | 413 | AAGGAATGAAATTCTGAC |
| chr5 | 177238144 | 177238162 | + | 414 | AATTTAAAAGGAATGAAATT |
| chr5 | 177238149 | 177238167 | + | 415 | AACACACTTTAAAAGGAATG |
| chr5 | 177238154 | 177238172 | + | 416 | AATAACACACTTTAAAAG |
| chr5 | 177238159 | 177238177 | + | 417 | AAAAGAATAACACACTTT |
| chr5 | 177238164 | 177238182 | + | 418 | AATGTCAAAAAGAATAACAC |
| chr5 | 177238169 | 177238187 | + | 419 | AATTAAGTGTCAAAAAGAAT |
| chr5 | 177238174 | 177238192 | + | 420 | AAGTAATTTAAGTGTCAAAA |
| chr5 | 177238179 | 177238197 | + | 421 | AATTGTTGTAATTTAAGTGT |
| chr5 | 177238184 | 177238202 | + | 422 | AACAAAATTGTTGTAATTTA |
| chr5 | 177238189 | 177238207 | + | 423 | AACAGGCCAAAATTGTTGTA |
| chr5 | 177238194 | 177238212 | + | 424 | AAGTCCACAGGCCAAAATTG |
| chr5 | 177238199 | 177238217 | + | 425 | AATAGAGTCCACAGGCCAA |
| chr5 | 177238237 | 177238255 | + | 426 | AACTTCACAGCGGGAACTTA |
| chr5 | 177238241 | 177238259 | + | 427 | AATCCTCTTCACAGCGGGAA |
| chr5 | 177238246 | 177238264 | + | 428 | AAGGCTTTCCTCTTCACAGC |
| chr5 | 177238251 | 177238269 | + | 429 | AATAGAAGGCTTTCCTCTTC |
| chr5 | 177238256 | 177238274 | + | 430 | AACGGGCTAGAAGGCTTTCC |
| chr5 | 177238261 | 177238279 | + | 431 | AAGACCTCGGGCTAGAAGGC |
| chr5 | 177238266 | 177238284 | + | 432 | AAGATCGACCTCGGGCTAG |
| chr5 | 177238271 | 177238289 | + | 433 | AAGCACTAGATCGACCTCGG |
| chr5 | 177238276 | 177238294 | + | 434 | AATCTGAGCACTAGATCGAC |
| chr5 | 177238281 | 177238299 | + | 435 | AACTTGTTCTGAGCACTAGA |
| chr5 | 177238286 | 177238304 | + | 436 | AACCTGCTTGTTCTGAGCA |
| chr5 | 177238291 | 177238309 | + | 437 | AACGTCCACCTGCTTGTTCT |
| chr5 | 177238296 | 177238314 | + | 438 | AATTCTCGTCCACCTGCTT |
| chr5 | 177238301 | 177238319 | + | 439 | AAAGAATTCTCGTCCACC |
| chr5 | 177238306 | 177238324 | + | 440 | AAATCAAAGAATTCTCGT |
| chr5 | 177238311 | 177238329 | + | 441 | AAGGTTGAAATCAAAGAATT |
| chr5 | 177238316 | 177238334 | + | 442 | AATCTTTGGTTGAAATCAAA |
| chr5 | 177238321 | 177238339 | + | 443 | AAGCTCTTCTTTGGTTGAAA |
| chr5 | 177238326 | 177238344 | + | 444 | AATGGAGGCTCTTCTTTGGT |
| chr5 | 177238331 | 177238349 | + | 445 | AAGAACTGGAGGCTCTTCT |
| chr5 | 177238336 | 177238354 | + | 446 | AATTTCAAGAACTGGAGGCT |
| chr5 | 177238341 | 177238359 | + | 447 | AACTCCCTTTCAAGAACTGG |
| chr5 | 177238346 | 177238364 | + | 448 | AAGGAGCCTCCCTTTCAAGA |
| chr5 | 177238351 | 177238369 | + | 449 | AAAACGGAGCCTCCCTTT |
| chr5 | 177238356 | 177238374 | + | 450 | AACTCCAAAAACGGAGCCTC |
| chr5 | 177238361 | 177238379 | + | 451 | AAGGGCCCTCCAAAAACGGA |
| chr5 | 177238366 | 177238384 | + | 452 | AACCAAGGGGCCCTCCAAAA |
| chr5 | 177238371 | 177238389 | + | 453 | AACTGAGCCAAGGGGCCCTC |
| chr5 | 177238376 | 177238394 | + | 454 | AATCTGACTGAGCCAAGGGG |
| chr5 | 177238381 | 177238399 | + | 455 | AACAAGTTCTGACTGAGCCA |
| chr5 | 177238386 | 177238404 | + | 456 | AACCTCCAAGTTCTGACTG |
| chr5 | 177238391 | 177238409 | + | 457 | AATGTCCACCTCCAAGTTCT |
| chr5 | 177238396 | 177238414 | + | 458 | AACAGCATGTCCACCTCCAA |
| chr5 | 177238401 | 177238419 | + | 459 | AACAACTCAGCATGTCCACC |
| chr5 | 177238406 | 177238424 | + | 460 | AATGCGGCAACTCAGCATGT |
| chr5 | 177238411 | 177238429 | + | 461 | AATCAGCTGCGGCAACTCAG |
| chr5 | 177238416 | 177238434 | + | 462 | AACAAGGTCAGCTGCGGCAA |
| chr5 | 177238421 | 177238439 | + | 463 | AACAGACAAGGTCAGCTGC |
| chr5 | 177238426 | 177238444 | + | 464 | AACAGGCACAGACAAGGTCA |
| chr5 | 177238431 | 177238449 | + | 465 | AAGCCACAGGCACAGACAA |
| chr5 | 177238436 | 177238454 | + | 466 | AATCCGGAGCCACAGGCACA |
| chr5 | 177238441 | 177238459 | + | 467 | AAGACTTCCGGAGCCACAG |
| chr5 | 177238446 | 177238464 | + | 468 | AATGGAGAGACTTCCGGAGC |
| chr5 | 177238451 | 177238469 | + | 469 | AAGGCCGTGGAGAGACTTCC |
| chr5 | 177238456 | 177238474 | + | 470 | AAGGGCAGGCCGTGGAGAGA |
| chr5 | 177238461 | 177238479 | + | 471 | AACTCAAGGGCAGGCCGTGG |
| chr5 | 177238466 | 177238484 | + | 472 | AATCAGACTCAAGGGCAGGC |
| chr5 | 177238471 | 177238489 | + | 473 | AATTCCTCAGACTCAAGGG |
| chr5 | 177238476 | 177238494 | + | 474 | AATAGCAATTCCTCAGACTC |
| chr5 | 177238481 | 177238499 | + | 475 | AATAACTAGCAATTCCTCAG |
| chr5 | 177238514 | 177238532 | + | 476 | AATTAACTAGCAATTCCTCA |
| chr5 | 177238519 | 177238537 | + | 477 | AATACTGAGACCCCAACCCC |
| chr5 | 177238524 | 177238542 | + | 478 | AATCAAATACTGAGACCCCA |
| chr5 | 177238529 | 177238547 | + | 479 | AATCTGCTCAAATACTGAGA |
| chr5 | 177238534 | 177238552 | + | 480 | AATCATATCTGCTCAAATAC |
| chr5 | 177238539 | 177238557 | + | 481 | AATCTAATCATATCTGCTCA |
| chr5 | 177238544 | 177238562 | + | 482 | AACTTCCTCTAATCATATCT |
| chr5 | 177238549 | 177238567 | + | 483 | AATCCTGCTTCCTCTAATCA |
| chr5 | 177238554 | 177238572 | + | 484 | AAATCTCCTGCTTCCTCT |
| chr5 | 177238559 | 177238577 | + | 485 | AATACTAAAATCTCCTGCTT |
| chr5 | 177238564 | 177238582 | + | 486 | AAACATACTAAAATCTCC |
| chr5 | 177238569 | 177238587 | + | 487 | AACATCAAAACATACTAAAA |
| chr5 | 177238574 | 177238592 | + | 488 | AACTTTACATCAAAACATAC |
| chr5 | 177238579 | 177238597 | + | 489 | AAGTTGGCTTTACATCAAAA |
| chr5 | 177238584 | 177238602 | + | 490 | AACAATGTTGGCTTTACAT |
| chr5 | 177238589 | 177238607 | + | 491 | AATAGATACAATGTTGGCTT |
| chr5 | 177238594 | 177238612 | + | 492 | AAGTATATAGATACAATGTT |
| chr5 | 177238599 | 177238617 | + | 493 | AATTATTGTATATAGATACA |
| chr5 | 177238604 | 177238622 | + | 494 | AAGTAGTTTATTGTATATAG |
| chr5 | 177238609 | 177238627 | + | 495 | AAGGGGGTAGTTTATTGTA |

TABLE 5B
Exemplary ASO Sequences

| | | | | | SEQ | |
|---|---|---|---|---|---|---|
| | | | | | ID | |
| chr | Start | End | Name | Strand | NO: | ASO sequence |
| chr5 | 177238118 | 177238136 | NSD1:NM_001365684: | + | 496 | GGCTACAAAAAGTGGATG |
| | | | U7:IVS7:−101 | | | |
| chr5 | 177238119 | 177238137 | NSD1:NM_001365684: | + | 497 | AGGCTACAAAAAGTGGAT |
| | | | U7:IVS7:−100 | | | |
| chr5 | 177238120 | 177238138 | NSD1:NM_001365684: | + | 498 | AAGGCTACAAAAAGTGGA |
| | | | U7:IVS7:−99 | | | |
| chr5 | 177238121 | 177238139 | NSD1:NM_001365684: | + | 499 | AAAGGCTACAAAAAGTGG |
| | | | U7:IVS7:−98 | | | |
| chr5 | 177238122 | 177238140 | NSD1:NM_001365684: | + | 500 | CAAAGGCTACAAAAAGTG |
| | | | U7:IVS7:−97 | | | |
| chr5 | 177238123 | 177238141 | NSD1:NM_001365684: | + | 501 | ACAAAGGCTACAAAAAGT |
| | | | U7:IVS7:−96 | | | |
| chr5 | 177238124 | 177238142 | NSD1:NM_001365684: | + | 502 | GACAAAGGCTACAAAAAG |
| | | | U7:IVS7:−95 | | | |
| chr5 | 177238125 | 177238143 | NSD1:NM_001365684: | + | 503 | TGACAAAGGCTACAAAAA |
| | | | U7:IVS7:−94 | | | |
| chr5 | 177238126 | 177238144 | NSD1:NM_001365684: | + | 504 | CTGACAAAGGCTACAAAA |
| | | | U7:IVS7:−93 | | | |
| chr5 | 177238127 | 177238145 | NSD1:NM_001365684: | + | 505 | TCTGACAAAGGCTACAAA |
| | | | U7:IVS7:−92 | | | |
| chr5 | 177238128 | 177238146 | NSD1:NM_001365684: | + | 506 | TTCTGACAAAGGCTACAA |
| | | | U7:IVS7:−91 | | | |
| chr5 | 177238129 | 177238147 | NSD1:NM_001365684: | + | 507 | ATTCTGACAAAGGCTACA |
| | | | U7:IVS7:−90 | | | |
| chr5 | 177238130 | 177238148 | NSD1:NM_001365684: | + | 508 | AATTCTGACAAAGGCTAC |
| | | | U7:IVS7:−89 | | | |
| chr5 | 177238131 | 177238149 | NSD1:NM_001365684: | + | 509 | AAATTCTGACAAAGGCTA |
| | | | U7:IVS7:−88 | | | |
| chr5 | 177238132 | 177238150 | NSD1:NM_001365684: | + | 510 | GAAATTCTGACAAAGGCT |
| | | | U7:IVS7:−87 | | | |
| chr5 | 177238133 | 177238151 | NSD1:NM_001365684: | + | 511 | TGAAATTCTGACAAAGGC |
| | | | U7:IVS7:−86 | | | |
| chr5 | 177238134 | 177238152 | NSD1:NM_001365684: | + | 512 | ATGAAATTCTGACAAAGG |
| | | | U7:IVS7:−85 | | | |
| chr5 | 177238135 | 177238153 | NSD1:NM_001365684: | + | 513 | AATGAAATTCTGACAAAG |
| | | | U7:IVS7:−84 | | | |
| chr5 | 177238136 | 177238154 | NSD1:NM_001365684: | + | 514 | GAATGAAATTCTGACAAA |
| | | | U7:IVS7:−83 | | | |
| chr5 | 177238137 | 177238155 | NSD1:NM_001365684: | + | 515 | GGAATGAAATTCTGACAA |
| | | | U7:IVS7:−82 | | | |
| chr5 | 177238138 | 177238156 | NSD1:NM_001365684: | + | 516 | AGGAATGAAATTCTGACA |
| | | | U7:IVS7:−81 | | | |
| chr5 | 177238139 | 177238157 | NSD1:NM_001365684: | + | 517 | AAGGAATGAAATTCTGAC |
| | | | U7:IVS7:−80 | | | |
| chr5 | 177238140 | 177238158 | NSD1:NM_001365684: | + | 518 | AAAGGAATGAAATTCTGA |
| | | | U7:IVS7:−79 | | | |
| chr5 | 177238141 | 177238159 | NSD1:NM_001365684: | + | 519 | AAAAGGAATGAAATTCTG |
| | | | U7:IVS7:−78 | | | |
| chr5 | 177238142 | 177238160 | NSD1:NM_001365684: | + | 520 | TAAAAGGAATGAAATTCT |
| | | | U7:IVS7:−77 | | | |
| chr5 | 177238143 | 177238161 | NSD1:NM_001365684: | + | 521 | TTAAAAGGAATGAAATTC |
| | | | U7:IVS7:−76 | | | |
| chr5 | 177238144 | 177238162 | NSD1:NM_001365684: | + | 522 | TTTAAAAGGAATGAAATT |
| | | | U7:IVS7:−75 | | | |
| chr5 | 177238145 | 177238163 | NSD1:NM_001365684: | + | 523 | CTTTAAAAGGAATGAAAT |
| | | | U7:IVS7:−74 | | | |
| chr5 | 177238146 | 177238164 | NSD1:NM_001365684: | + | 524 | ACTTTAAAAGGAATGAAA |
| | | | U7:IVS7:−73 | | | |
| chr5 | 177238147 | 177238165 | NSD1:NM_001365684: | + | 525 | CACTTTAAAAGGAATGAA |
| | | | U7:IVS7:−72 | | | |
| chr5 | 177238148 | 177238166 | NSD1:NM_001365684: | + | 526 | ACACTTTAAAAGGAATGA |
| | | | U7:IVS7:−71 | | | |
| chr5 | 177238149 | 177238167 | NSD1:NM_001365684: | + | 527 | CACACTTTAAAAGGAATG |
| | | | U7:IVS7:−70 | | | |
| chr5 | 177238150 | 177238168 | NSD1:NM_001365684: | + | 528 | ACACACTTTAAAAGGAAT |
| | | | U7:IVS7:−69 | | | |
| chr5 | 177238151 | 177238169 | NSD1:NM_001365684: | + | 529 | AACACACTTTAAAAGGAA |
| | | | U7:IVS7:−68 | | | |
| chr5 | 177238152 | 177238170 | NSD1:NM_001365684: | + | 530 | TAACACACTTTAAAAGGA |
| | | | U7:IVS7:−67 | | | |
| chr5 | 177238153 | 177238171 | NSD1:NM_001365684: | + | 531 | ATAACACACTTTAAAAGG |
| | | | U7:IVS7:−66 | | | |
| chr5 | 177238154 | 177238172 | NSD1:NM_001365684: | + | 532 | AATAACACACTTTAAAAG |
| | | | U7:IVS7:−65 | | | |
| chr5 | 177238155 | 177238173 | NSD1:NM_001365684: | + | 533 | GAATAACACACTTTAAAA |
| | | | U7:IVS7:−64 | | | |
| chr5 | 177238156 | 177238174 | NSD1:NM_001365684: | + | 534 | AGAATAACACACTTTAAA |
| | | | U7:IVS7:−63 | | | |
| chr5 | 177238157 | 177238175 | NSD1:NM_001365684: | + | 535 | AAGAATAACACACTTTAA |
| | | | U7:IVS7:−62 | | | |
| chr5 | 177238158 | 177238176 | NSD1:NM_001365684: | + | 536 | AAAGAATAACACACTTTA |
| | | | U7:IVS7:−61 | | | |
| chr5 | 177238159 | 177238177 | NSD1:NM_001365684: | + | 537 | AAAAGAATAACACACTTT |
| | | | U7:IVS7:−60 | | | |
| chr5 | 177238160 | 177238178 | NSD1:NM_001365684: | + | 538 | AAAAAGAATAACACACTT |
| | | | U7:IVS7:−59 | | | |
| chr5 | 177238161 | 177238179 | NSD1:NM_001365684: | + | 539 | CAAAAAGAATAACACACT |
| | | | U7:IVS7:−58 | | | |
| chr5 | 177238162 | 177238180 | NSD1:NM_001365684: | + | 540 | TCAAAAAGAATAACACAC |
| | | | U7:IVS7:−57 | | | |
| chr5 | 177238163 | 177238181 | NSD1:NM_001365684: | + | 541 | GTCAAAAAGAATAACACA |
| | | | U7:IVS7:−56 | | | |
| chr5 | 177238164 | 177238182 | NSD1:NM_001365684: | + | 542 | TGTCAAAAAGAATAACAC |
| | | | U7:IVS7:−55 | | | |
| chr5 | 177238165 | 177238183 | NSD1:NM_001365684: | + | 543 | GTGTCAAAAAGAATAACA |
| | | | U7:IVS7:−54 | | | |
| chr5 | 177238166 | 177238184 | NSD1:NM_001365684: | + | 544 | AGTGTCAAAAAGAATAAC |
| | | | U7:IVS7:−53 | | | |
| chr5 | 177238167 | 177238185 | NSD1:NM_001365684: | + | 545 | AAGTGTCAAAAAGAATAA |
| | | | U7:IVS7:−52 | | | |
| chr5 | 177238168 | 177238186 | NSD1:NM_001365684: | + | 546 | TAAGTGTCAAAAAGAATA |
| | | | U7:IVS7:−51 | | | |
| chr5 | 177238169 | 177238187 | NSD1:NM_001365684: | + | 547 | TTAAGTGTCAAAAAGAAT |
| | | | U7:IVS7:−50 | | | |
| chr5 | 177238170 | 177238188 | NSD1:NM_001365684: | + | 548 | TTTAAGTGTCAAAAAGAA |
| | | | U7:IVS7:−49 | | | |
| chr5 | 177238171 | 177238189 | NSD1:NM_001365684: | + | 549 | ATTTAAGTGTCAAAAAGA |
| | | | U7:IVS7:−48 | | | |
| chr5 | 177238172 | 177238190 | NSD1:NM_001365684: | + | 550 | AATTTAAGTGTCAAAAAG |
| | | | U7:IVS7:−47 | | | |
| chr5 | 177238173 | 177238191 | NSD1:NM_001365684: | + | 551 | TAATTTAAGTGTCAAAAA |
| | | | U7:IVS7:−46 | | | |
| chr5 | 177238174 | 177238192 | NSD1:NM_001365684: | + | 552 | GTAATTTAAGTGTCAAAA |
| | | | U7:IVS7:−45 | | | |
| chr5 | 177238175 | 177238193 | NSD1:NM_001365684: | + | 553 | TGTAATTTAAGTGTCAAA |
| | | | U7:IVS7:−44 | | | |
| chr5 | 177238176 | 177238194 | NSD1:NM_001365684: | + | 554 | TTGTAATTTAAGTGTCAA |
| | | | U7:IVS7:−43 | | | |
| chr5 | 177238177 | 177238195 | NSD1:NM_001365684: | + | 555 | GTTGTAATTTAAGTGTCA |
| | | | U7:IVS7:−42 | | | |
| chr5 | 177238178 | 177238196 | NSD1:NM_001365684: | + | 556 | TGTTGTAATTTAAGTGTC |
| | | | U7:IVS7:−41 | | | |
| chr5 | 177238179 | 177238197 | NSD1:NM_001365684: | + | 557 | TTGTTGTAATTTAAGTGT |
| | | | U7:IVS7:−40 | | | |
| chr5 | 177238180 | 177238198 | NSD1:NM_001365684: | + | 558 | ATTGTTGTAATTTAAGTG |
| | | | U7:IVS7:−39 | | | |
| chr5 | 177238181 | 177238199 | NSD1:NM_001365684: | + | 559 | AATTGTTGTAATTTAAGT |
| | | | U7:IVS7:−38 | | | |
| chr5 | 177238182 | 177238200 | NSD1:NM_001365684: | + | 560 | AAATTGTTGTAATTTAAG |
| | | | U7:IVS7:−37 | | | |
| chr5 | 177238183 | 177238201 | NSD1:NM_001365684: | + | 561 | AAAATTGTTGTAATTTAA |
| | | | U7:IVS7:−36 | | | |
| chr5 | 177238184 | 177238202 | NSD1:NM_001365684: | + | 562 | CAAAATTGTTGTAATTTA |
| | | | U7:IVS7:−35 | | | |
| chr5 | 177238185 | 177238203 | NSD1:NM_001365684: | + | 563 | CCAAAATTGTTGTAATTT |
| | | | U7:IVS7:−34 | | | |
| chr5 | 177238186 | 177238204 | NSD1:NM_001365684: | + | 564 | GCCAAAATTGTTGTAATT |
| | | | U7:IVS7:−33 | | | |
| chr5 | 177238187 | 177238205 | NSD1:NM_001365684: | + | 565 | GGCCAAAATTGTTGTAAT |
| | | | U7:IVS7:−32 | | | |
| chr5 | 177238188 | 177238206 | NSD1:NM_001365684: | + | 566 | AGGCCAAAATTGTTGTAA |
| | | | U7:IVS7:−31 | | | |
| chr5 | 177238189 | 177238207 | NSD1:NM_001365684: | + | 567 | CAGGCCAAAATTGTTGTA |
| | | | U7:IVS7:−30 | | | |
| chr5 | 177238190 | 177238208 | NSD1:NM_001365684: | + | 568 | ACAGGCCAAAATTGTTGT |
| | | | U7:IVS7:−29 | | | |
| chr5 | 177238191 | 177238209 | NSD1:NM_001365684: | + | 569 | CACAGGCCAAAATTGTTG |
| | | | U7:IVS7:−28 | | | |
| chr5 | 177238192 | 177238210 | NSD1:NM_001365684: | + | 570 | CCACAGGCCAAAATTGTT |
| | | | U7:IVS7:−27 | | | |
| chr5 | 177238193 | 177238211 | NSD1:NM_001365684: | + | 571 | TCCACAGGCCAAAATTGT |
| | | | U7:IVS7:−26 | | | |
| chr5 | 177238194 | 177238212 | NSD1:NM_001365684: | + | 572 | GTCCACAGGCCAAAATTG |
| | | | U7:IVS7:−25 | | | |
| chr5 | 177238195 | 177238213 | NSD1:NM_001365684: | + | 573 | AGTCCACAGGCCAAAATT |
| | | | U7:IVS7:−24 | | | |
| chr5 | 177238196 | 177238214 | NSD1:NM_001365684: | + | 574 | GAGTCCACAGGCCAAAAT |
| | | | U7:IVS7:−23 | | | |
| chr5 | 177238197 | 177238215 | NSD1:NM_001365684: | + | 575 | AGAGTCCACAGGCCAAAA |
| | | | U7:IVS7:−22 | | | |
| chr5 | 177238198 | 177238216 | NSD1:NM_001365684: | + | 576 | TAGAGTCCACAGGCCAAA |
| | | | U7:IVS7:−21 | | | |
| chr5 | 177238199 | 177238217 | NSD1:NM_001365684: | + | 577 | ATAGAGTCCACAGGCCAA |
| | | | U7:IVS7:−20 | | | |
| chr5 | 177238200 | 177238218 | NSD1:NM_001365684: | + | 578 | AATAGAGTCCACAGGCCA |
| | | | U7:IVS7:−19 | | | |
| chr5 | 177238201 | 177238219 | NSD1:NM_001365684: | + | 579 | AAATAGAGTCCACAGGCC |
| | | | U7:IVS7:−18 | | | |
| chr5 | 177238202 | 177238220 | NSD1:NM_001365684: | + | 580 | AAAATAGAGTCCACAGGC |
| | | | U7:IVS7:−17 | | | |
| chr5 | 177238237 | 177238255 | NSD1:NM_001365684: | + | 581 | CTTCACAGCGGGAACTTA |
| | | | U7:Ex8:2 | | | |
| chr5 | 177238238 | 177238256 | NSD1:NM_001365684: | + | 582 | TCTTCACAGCGGGAACTT |
| | | | U7:Ex8:3 | | | |
| chr5 | 177238239 | 177238257 | NSD1:NM_001365684: | + | 583 | CTCTTCACAGCGGGAACT |
| | | | U7:Ex8:4 | | | |
| chr5 | 177238240 | 177238258 | NSD1:NM_001365684: | + | 584 | CCTCTTCACAGCGGGAAC |
| | | | U7:Ex8:5 | | | |
| chr5 | 177238241 | 177238259 | NSD1:NM_001365684: | + | 585 | TCCTCTTCACAGCGGGAA |
| | | | U7:Ex8:6 | | | |
| chr5 | 177238242 | 177238260 | NSD1:NM_001365684: | + | 586 | TTCCTCTTCACAGCGGGA |
| | | | U7:Ex8:7 | | | |
| chr5 | 177238243 | 177238261 | NSD1:NM_001365684: | + | 587 | TTTCCTCTTCACAGCGGG |
| | | | U7:Ex8:8 | | | |
| chr5 | 177238244 | 177238262 | NSD1:NM_001365684: | + | 588 | CTTTCCTCTTCACAGCGG |
| | | | U7:Ex8:9 | | | |
| chr5 | 177238245 | 177238263 | NSD1:NM_001365684: | + | 589 | GCTTTCCTCTTCACAGCG |
| | | | U7:Ex8:10 | | | |
| chr5 | 177238246 | 177238264 | NSD1:NM_001365684: | + | 590 | GGCTTTCCTCTTCACAGC |
| | | | U7:Ex8:11 | | | |
| chr5 | 177238247 | 177238265 | NSD1:NM_001365684: | + | 591 | AGGCTTTCCTCTTCACAG |
| | | | U7:Ex8:12 | | | |
| chr5 | 177238248 | 177238266 | NSD1:NM_001365684: | + | 592 | AAGGCTTTCCTCTTCACA |
| | | | U7:Ex8:13 | | | |
| chr5 | 177238249 | 177238267 | NSD1:NM_001365684: | + | 593 | GAAGGCTTTCCTCTTCAC |
| | | | U7:Ex8:14 | | | |
| chr5 | 177238250 | 177238268 | NSD1:NM_001365684: | + | 594 | AGAAGGCTTTCCTCTTCA |
| | | | U7:Ex8:15 | | | |
| chr5 | 177238251 | 177238269 | NSD1:NM_001365684: | + | 595 | TAGAAGGCTTTCCTCTTC |
| | | | U7:Ex8:16 | | | |
| chr5 | 177238252 | 177238270 | NSD1:NM_001365684: | + | 596 | CTAGAAGGCTTTCCTCTT |
| | | | U7:Ex8:17 | | | |
| chr5 | 177238253 | 177238271 | NSD1:NM_001365684: | + | 597 | GCTAGAAGGCTTTCCTCT |
| | | | U7:Ex8:18 | | | |
| chr5 | 177238254 | 177238272 | NSD1:NM_001365684: | + | 598 | GGCTAGAAGGCTTTCCTC |
| | | | U7:Ex8:19 | | | |
| chr5 | 177238255 | 177238273 | NSD1:NM_001365684: | + | 599 | GGGCTAGAAGGCTTTCCT |
| | | | U7:Ex8:20 | | | |
| chr5 | 177238256 | 177238274 | NSD1:NM_001365684: | + | 600 | CGGGCTAGAAGGCTTTCC |
| | | | U7:Ex8:21 | | | |
| chr5 | 177238257 | 177238275 | NSD1:NM_001365684: | + | 601 | TCGGGCTAGAAGGCTTTC |
| | | | U7:Ex8:22 | | | |
| chr5 | 177238258 | 177238276 | NSD1:NM_001365684: | + | 602 | CTCGGGCTAGAAGGCTTT |
| | | | U7:Ex8:23 | | | |
| chr5 | 177238259 | 177238277 | NSD1:NM_001365684: | + | 603 | CCTCGGGCTAGAAGGCTT |
| | | | U7:Ex8:24 | | | |
| chr5 | 177238260 | 177238278 | NSD1:NM_001365684: | + | 604 | ACCTCGGGCTAGAAGGCT |
| | | | U7:Ex8:25 | | | |
| chr5 | 177238261 | 177238279 | NSD1:NM_001365684: | + | 605 | GACCTCGGGCTAGAAGGC |
| | | | U7:Ex8:26 | | | |
| chr5 | 177238262 | 177238280 | NSD1:NM_001365684: | + | 606 | CGACCTCGGGCTAGAAGG |
| | | | U7:Ex8:27 | | | |
| chr5 | 177238263 | 177238281 | NSD1:NM_001365684: | + | 607 | TCGACCTCGGGCTAGAAG |
| | | | U7:Ex8:28 | | | |
| chr5 | 177238264 | 177238282 | NSD1:NM_001365684: | + | 608 | ATCGACCTCGGGCTAGAA |
| | | | U7:Ex8:29 | | | |
| chr5 | 177238265 | 177238283 | NSD1:NM_001365684: | + | 609 | GATCGACCTCGGGCTAGA |
| | | | U7:Ex8:30 | | | |
| chr5 | 177238266 | 177238284 | NSD1:NM_001365684: | + | 610 | AGATCGACCTCGGGCTAG |
| | | | U7:Ex8:31 | | | |
| chr5 | 177238267 | 177238285 | NSD1:NM_001365684: | + | 611 | TAGATCGACCTCGGGCTA |
| | | | U7:Ex8:32 | | | |
| chr5 | 177238268 | 177238286 | NSD1:NM_001365684: | + | 612 | CTAGATCGACCTCGGGCT |
| | | | U7:Ex8:33 | | | |
| chr5 | 177238269 | 177238287 | NSD1:NM_001365684: | + | 613 | ACTAGATCGACCTCGGGC |
| | | | U7:Ex8:34 | | | |
| chr5 | 177238270 | 177238288 | NSD1:NM_001365684: | + | 614 | CACTAGATCGACCTCGGG |
| | | | U7:Ex8:35 | | | |
| chr5 | 177238271 | 177238289 | NSD1:NM_001365684: | + | 615 | GCACTAGATCGACCTCGG |
| | | | U7:Ex8:36 | | | |
| chr5 | 177238272 | 177238290 | NSD1:NM_001365684: | + | 616 | AGCACTAGATCGACCTCG |
| | | | U7:Ex8:37 | | | |
| chr5 | 177238273 | 177238291 | NSD1:NM_001365684: | + | 617 | GAGCACTAGATCGACCTC |
| | | | U7:Ex8:38 | | | |
| chr5 | 177238274 | 177238292 | NSD1:NM_001365684: | + | 618 | TGAGCACTAGATCGACCT |
| | | | U7:Ex8:39 | | | |
| chr5 | 177238275 | 177238293 | NSD1:NM_001365684: | + | 619 | CTGAGCACTAGATCGACC |
| | | | U7:Ex8:40 | | | |
| chr5 | 177238276 | 177238294 | NSD1:NM_001365684: | + | 620 | TCTGAGCACTAGATCGAC |
| | | | U7:Ex8:41 | | | |
| chr5 | 177238277 | 177238295 | NSD1:NM_001365684: | + | 621 | TTCTGAGCACTAGATCGA |
| | | | U7:Ex8:42 | | | |
| chr5 | 177238278 | 177238296 | NSD1:NM_001365684: | + | 622 | GTTCTGAGCACTAGATCG |
| | | | U7:Ex8:43 | | | |
| chr5 | 177238279 | 177238297 | NSD1:NM_001365684: | + | 623 | TGTTCTGAGCACTAGATC |
| | | | U7:Ex8:44 | | | |
| chr5 | 177238280 | 177238298 | NSD1:NM_001365684: | + | 624 | TTGTTCTGAGCACTAGAT |
| | | | U7:Ex8:45 | | | |
| chr5 | 177238281 | 177238299 | NSD1:NM_001365684: | + | 625 | CTTGTTCTGAGCACTAGA |
| | | | U7:Ex8:46 | | | |
| chr5 | 177238282 | 177238300 | NSD1:NM_001365684: | + | 626 | GCTTGTTCTGAGCACTAG |
| | | | U7:Ex8:47 | | | |
| chr5 | 177238283 | 177238301 | NSD1:NM_001365684: | + | 627 | TGCTTGTTCTGAGCACTA |
| | | | U7:Ex8:48 | | | |
| chr5 | 177238284 | 177238302 | NSD1:NM_001365684: | + | 628 | CTGCTTGTTCTGAGCACT |
| | | | U7:Ex8:49 | | | |
| chr5 | 177238285 | 177238303 | NSD1:NM_001365684: | + | 629 | CCTGCTTGTTCTGAGCAC |
| | | | U7:Ex8:50 | | | |
| chr5 | 177238286 | 177238304 | NSD1:NM_001365684: | + | 630 | ACCTGCTTGTTCTGAGCA |
| | | | U7:Ex8:51 | | | |
| chr5 | 177238287 | 177238305 | NSD1:NM_001365684: | + | 631 | CACCTGCTTGTTCTGAGC |
| | | | U7:Ex8:52 | | | |
| chr5 | 177238288 | 177238306 | NSD1:NM_001365684: | + | 632 | CCACCTGCTTGTTCTGAG |
| | | | U7:Ex8:53 | | | |
| chr5 | 177238289 | 177238307 | NSD1:NM_001365684: | + | 633 | TCCACCTGCTTGTTCTGA |
| | | | U7:Ex8:54 | | | |
| chr5 | 177238290 | 177238308 | NSD1:NM_001365684: | + | 634 | GTCCACCTGCTTGTTCTG |
| | | | U7:Ex8:55 | | | |
| chr5 | 177238291 | 177238309 | NSD1:NM_001365684: | + | 635 | CGTCCACCTGCTTGTTCT |
| | | | U7:Ex8:56 | | | |
| chr5 | 177238292 | 177238310 | NSD1:NM_001365684: | + | 636 | TCGTCCACCTGCTTGTTC |
| | | | U7:Ex8:57 | | | |
| chr5 | 177238293 | 177238311 | NSD1:NM_001365684: | + | 637 | CTCGTCCACCTGCTTGTT |
| | | | U7:Ex8:58 | | | |
| chr5 | 177238294 | 177238312 | NSD1:NM_001365684: | + | 638 | TCTCGTCCACCTGCTTGT |
| | | | U7:Ex8:59 | | | |
| chr5 | 177238295 | 177238313 | NSD1:NM_001365684: | + | 639 | TTCTCGTCCACCTGCTTG |
| | | | U7:Ex8:60 | | | |
| chr5 | 177238296 | 177238314 | NSD1:NM_001365684: | + | 640 | ATTCTCGTCCACCTGCTT |
| | | | U7:Ex8:61 | | | |
| chr5 | 177238297 | 177238315 | NSD1:NM_001365684: | + | 641 | AATTCTCGTCCACCTGCT |
| | | | U7:Ex8:62 | | | |
| chr5 | 177238298 | 177238316 | NSD1:NM_001365684: | + | 642 | GAATTCTCGTCCACCTGC |
| | | | U7:Ex8:63 | | | |
| chr5 | 177238299 | 177238317 | NSD1:NM_001365684: | + | 643 | AGAATTCTCGTCCACCTG |
| | | | U7:Ex8:64 | | | |
| chr5 | 177238300 | 177238318 | NSD1:NM_001365684: | + | 644 | AAGAATTCTCGTCCACCT |
| | | | U7:Ex8:65 | | | |
| chr5 | 177238301 | 177238319 | NSD1:NM_001365684: | + | 645 | AAAGAATTCTCGTCCACC |
| | | | U7:Ex8:66 | | | |
| chr5 | 177238302 | 177238320 | NSD1:NM_001365684: | + | 646 | CAAAGAATTCTCGTCCAC |
| | | | U7:Ex8:67 | | | |
| chr5 | 177238303 | 177238321 | NSD1:NM_001365684: | + | 647 | TCAAAGAATTCTCGTCCA |
| | | | U7:Ex8:68 | | | |
| chr5 | 177238304 | 177238322 | NSD1:NM_001365684: | + | 648 | ATCAAAGAATTCTCGTCC |
| | | | U7:Ex8:69 | | | |
| chr5 | 177238305 | 177238323 | NSD1:NM_001365684: | + | 649 | AATCAAAGAATTCTCGTC |
| | | | U7:Ex8:70 | | | |
| chr5 | 177238306 | 177238324 | NSD1:NM_001365684: | + | 650 | AAATCAAAGAATTCTCGT |
| | | | U7:Ex8:71 | | | |
| chr5 | 177238307 | 177238325 | NSD1:NM_001365684: | + | 651 | GAAATCAAAGAATTCTCG |
| | | | U7:Ex8:72 | | | |
| chr5 | 177238308 | 177238326 | NSD1:NM_001365684: | + | 652 | TGAAATCAAAGAATTCTC |
| | | | U7:Ex8:73 | | | |
| chr5 | 177238309 | 177238327 | NSD1:NM_001365684: | + | 653 | TTGAAATCAAAGAATTCT |
| | | | U7:Ex8:74 | | | |
| chr5 | 177238310 | 177238328 | NSD1:NM_001365684: | + | 654 | GTTGAAATCAAAGAATTC |
| | | | U7:Ex8:75 | | | |
| chr5 | 177238311 | 177238329 | NSD1:NM_001365684: | + | 655 | GGTTGAAATCAAAGAATT |
| | | | U7:Ex8:76 | | | |
| chr5 | 177238312 | 177238330 | NSD1:NM_001365684: | + | 656 | TGGTTGAAATCAAAGAAT |
| | | | U7:Ex8:77 | | | |
| chr5 | 177238313 | 177238331 | NSD1:NM_001365684: | + | 657 | TTGGTTGAAATCAAAGAA |
| | | | U7:Ex8:78 | | | |
| chr5 | 177238314 | 177238332 | NSD1:NM_001365684: | + | 658 | TTTGGTTGAAATCAAAGA |
| | | | U7:Ex8:79 | | | |
| chr5 | 177238315 | 177238333 | NSD1:NM_001365684: | + | 659 | CTTTGGTTGAAATCAAAG |
| | | | U7:Ex8:80 | | | |
| chr5 | 177238316 | 177238334 | NSD1:NM_001365684: | + | 660 | TCTTTGGTTGAAATCAAA |
| | | | U7:Ex8:81 | | | |
| chr5 | 177238317 | 177238335 | NSD1:NM_001365684: | + | 661 | TTCTTTGGTTGAAATCAA |
| | | | U7:Ex8:82 | | | |
| chr5 | 177238318 | 177238336 | NSD1:NM_001365684: | + | 662 | CTTCTTTGGTTGAAATCA |
| | | | U7:Ex8:83 | | | |
| chr5 | 177238319 | 177238337 | NSD1:NM_001365684: | + | 663 | TCTTCTTTGGTTGAAATC |
| | | | U7:Ex8:84 | | | |
| chr5 | 177238320 | 177238338 | NSD1:NM_001365684: | + | 664 | CTCTTCTTTGGTTGAAAT |
| | | | U7:Ex8:85 | | | |
| chr5 | 177238321 | 177238339 | NSD1:NM_001365684: | + | 665 | GCTCTTCTTTGGTTGAAA |
| | | | U7:Ex8:86 | | | |
| chr5 | 177238322 | 177238340 | NSD1:NM_001365684: | + | 666 | GGCTCTTCTTTGGTTGAA |
| | | | U7:Ex8:87 | | | |
| chr5 | 177238323 | 177238341 | NSD1:NM_001365684: | + | 667 | AGGCTCTTCTTTGGTTGA |
| | | | U7:Ex8:88 | | | |
| chr5 | 177238324 | 177238342 | NSD1:NM_001365684: | + | 668 | GAGGCTCTTCTTTGGTTG |
| | | | U7:Ex8:89 | | | |
| chr5 | 177238325 | 177238343 | NSD1:NM_001365684: | + | 669 | GGAGGCTCTTCTTTGGTT |
| | | | U7:Ex8:90 | | | |
| chr5 | 177238326 | 177238344 | NSD1:NM_001365684: | + | 670 | TGGAGGCTCTTCTTTGGT |
| | | | U7:Ex8:91 | | | |
| chr5 | 177238327 | 177238345 | NSD1:NM_001365684: | + | 671 | CTGGAGGCTCTTCTTTGG |
| | | | U7:Ex8:92 | | | |
| chr5 | 177238328 | 177238346 | NSD1:NM_001365684: | + | 672 | ACTGGAGGCTCTTCTTTG |
| | | | U7:Ex8:93 | | | |
| chr5 | 177238329 | 177238347 | NSD1:NM_001365684: | + | 673 | AACTGGAGGCTCTTCTTT |
| | | | U7:Ex8:94 | | | |
| chr5 | 177238330 | 177238348 | NSD1:NM_001365684: | + | 674 | GAACTGGAGGCTCTTCTT |
| | | | U7:Ex8:95 | | | |
| chr5 | 177238331 | 177238349 | NSD1:NM_001365684: | + | 675 | AGAACTGGAGGCTCTTCT |
| | | | U7:Ex8:96 | | | |
| chr5 | 177238332 | 177238350 | NSD1:NM_001365684: | + | 676 | AAGAACTGGAGGCTCTTC |
| | | | U7:Ex8:97 | | | |
| chr5 | 177238333 | 177238351 | NSD1:NM_001365684: | + | 677 | CAAGAACTGGAGGCTCTT |
| | | | U7:Ex8:98 | | | |
| chr5 | 177238334 | 177238352 | NSD1:NM_001365684: | + | 678 | TCAAGAACTGGAGGCTCT |
| | | | U7:Ex8:99 | | | |
| chr5 | 177238335 | 177238353 | NSD1:NM_001365684: | + | 679 | TTCAAGAACTGGAGGCTC |
| | | | U7:Ex8:100 | | | |
| chr5 | 177238336 | 177238354 | NSD1:NM_001365684: | + | 680 | TTTCAAGAACTGGAGGCT |
| | | | U7:Ex8:101 | | | |
| chr5 | 177238337 | 177238355 | NSD1:NM_001365684: | + | 681 | CTTTCAAGAACTGGAGGC |
| | | | U7:Ex8:102 | | | |
| chr5 | 177238338 | 177238356 | NSD1:NM_001365684: | + | 682 | CCTTTCAAGAACTGGAGG |
| | | | U7:Ex8:103 | | | |
| chr5 | 177238339 | 177238357 | NSD1:NM_001365684: | + | 683 | CCCTTTCAAGAACTGGAG |
| | | | U7:Ex8:104 | | | |
| chr5 | 177238340 | 177238358 | NSD1:NM_001365684: | + | 684 | TCCCTTTCAAGAACTGGA |
| | | | U7:Ex8:105 | | | |
| chr5 | 177238341 | 177238359 | NSD1:NM_001365684: | + | 685 | CTCCCTTTCAAGAACTGG |
| | | | U7:Ex8:106 | | | |
| chr5 | 177238342 | 177238360 | NSD1:NM_001365684: | + | 686 | CCTCCCTTTCAAGAACTG |
| | | | U7:Ex8:107 | | | |
| chr5 | 177238343 | 177238361 | NSD1:NM_001365684: | + | 687 | GCCTCCCTTTCAAGAACT |
| | | | U7:Ex8:108 | | | |
| chr5 | 177238344 | 177238362 | NSD1:NM_001365684: | + | 688 | AGCCTCCCTTTCAAGAAC |
| | | | U7:Ex8:109 | | | |
| chr5 | 177238345 | 177238363 | NSD1:NM_001365684: | + | 689 | GAGCCTCCCTTTCAAGAA |
| | | | U7:Ex8:110 | | | |
| chr5 | 177238346 | 177238364 | NSD1:NM_001365684: | + | 690 | GGAGCCTCCCTTTCAAGA |
| | | | U7:Ex8:111 | | | |
| chr5 | 177238347 | 177238365 | NSD1:NM_001365684: | + | 691 | CGGAGCCTCCCTTTCAAG |
| | | | U7:Ex8:112 | | | |
| chr5 | 177238348 | 177238366 | NSD1:NM_001365684: | + | 692 | ACGGAGCCTCCCTTTCAA |
| | | | U7:Ex8:113 | | | |
| chr5 | 177238349 | 177238367 | NSD1:NM_001365684: | + | 693 | AACGGAGCCTCCCTTTCA |
| | | | U7:Ex8:114 | | | |
| chr5 | 177238350 | 177238368 | NSD1:NM_001365684: | + | 694 | AAACGGAGCCTCCCTTTC |
| | | | U7:Ex8:115 | | | |
| chr5 | 177238351 | 177238369 | NSD1:NM_001365684: | + | 695 | AAAACGGAGCCTCCCTTT |
| | | | U7:Ex8:116 | | | |
| chr5 | 177238352 | 177238370 | NSD1:NM_001365684: | + | 696 | AAAAACGGAGCCTCCCTT |
| | | | U7:Ex8:117 | | | |
| chr5 | 177238353 | 177238371 | NSD1:NM_001365684: | + | 697 | CAAAAACGGAGCCTCCCT |
| | | | U7:Ex8:118 | | | |
| chr5 | 177238354 | 177238372 | NSD1:NM_001365684: | + | 698 | CCAAAAACGGAGCCTCCC |
| | | | U7:Ex8:119 | | | |
| chr5 | 177238355 | 177238373 | NSD1:NM_001365684: | + | 699 | TCCAAAAACGGAGCCTCC |
| | | | U7:Ex8:120 | | | |
| chr5 | 177238356 | 177238374 | NSD1:NM_001365684: | + | 700 | CTCCAAAAACGGAGCCTC |
| | | | U7:Ex8:121 | | | |
| chr5 | 177238357 | 177238375 | NSD1:NM_001365684: | + | 701 | CCTCCAAAAACGGAGCCT |
| | | | U7:Ex8:122 | | | |
| chr5 | 177238358 | 177238376 | NSD1:NM_001365684: | + | 702 | CCCTCCAAAAACGGAGCC |
| | | | U7:Ex8:123 | | | |
| chr5 | 177238359 | 177238377 | NSD1:NM_001365684: | + | 703 | GCCCTCCAAAAACGGAGC |
| | | | U7:Ex8:124 | | | |
| chr5 | 177238360 | 177238378 | NSD1:NM_001365684: | + | 704 | GGCCCTCCAAAAACGGAG |
| | | | U7:Ex8:125 | | | |
| chr5 | 177238361 | 177238379 | NSD1:NM_001365684: | + | 705 | GGGCCCTCCAAAAACGGA |
| | | | U7:Ex8:126 | | | |
| chr5 | 177238362 | 177238380 | NSD1:NM_001365684: | + | 706 | GGGGCCCTCCAAAAACGG |
| | | | U7:Ex8:127 | | | |
| chr5 | 177238363 | 177238381 | NSD1:NM_001365684: | + | 707 | AGGGGCCCTCCAAAAACG |
| | | | U7:Ex8:128 | | | |
| chr5 | 177238364 | 177238382 | NSD1:NM_001365684: | + | 708 | AAGGGGCCCTCCAAAAAC |
| | | | U7:Ex8:129 | | | |
| chr5 | 177238365 | 177238383 | NSD1:NM_001365684: | + | 709 | CAAGGGGCCCTCCAAAAA |
| | | | U7:Ex8:130 | | | |
| chr5 | 177238366 | 177238384 | NSD1:NM_001365684: | + | 710 | CCAAGGGGCCCTCCAAAA |
| | | | U7:Ex8:131 | | | |
| chr5 | 177238367 | 177238385 | NSD1:NM_001365684: | + | 711 | GCCAAGGGGCCCTCCAAA |
| | | | U7:Ex8:132 | | | |
| chr5 | 177238368 | 177238386 | NSD1:NM_001365684: | + | 712 | AGCCAAGGGGCCCTCCAA |
| | | | U7:Ex8:133 | | | |
| chr5 | 177238369 | 177238387 | NSD1:NM_001365684: | + | 713 | GAGCCAAGGGGCCCTCCA |
| | | | U7:Ex8:134 | | | |
| chr5 | 177238370 | 177238388 | NSD1:NM_001365684: | + | 714 | TGAGCCAAGGGGCCCTCC |
| | | | U7:Ex8:135 | | | |
| chr5 | 177238371 | 177238389 | NSD1:NM_001365684: | + | 715 | CTGAGCCAAGGGGCCCTC |
| | | | U7:Ex8:−119 | | | |
| chr5 | 177238372 | 177238390 | NSD1:NM_001365684: | + | 716 | ACTGAGCCAAGGGGCCCT |
| | | | U7:Ex8:−118 | | | |
| chr5 | 177238373 | 177238391 | NSD1:NM_001365684: | + | 717 | GACTGAGCCAAGGGGCCC |
| | | | U7:Ex8:−117 | | | |
| chr5 | 177238374 | 177238392 | NSD1:NM_001365684: | + | 718 | TGACTGAGCCAAGGGGCC |
| | | | U7:Ex8:−116 | | | |
| chr5 | 177238375 | 177238393 | NSD1:NM_001365684: | + | 719 | CTGACTGAGCCAAGGGGC |
| | | | U7:Ex8:−115 | | | |
| chr5 | 177238376 | 177238394 | NSD1:NM_001365684: | + | 720 | TCTGACTGAGCCAAGGGG |
| | | | U7:Ex8:−114 | | | |
| chr5 | 177238377 | 177238395 | NSD1:NM_001365684: | + | 721 | TTCTGACTGAGCCAAGGG |
| | | | U7:Ex8:−113 | | | |
| chr5 | 177238378 | 177238396 | NSD1:NM_001365684: | + | 722 | GTTCTGACTGAGCCAAGG |
| | | | U7:Ex8:−112 | | | |
| chr5 | 177238379 | 177238397 | NSD1:NM_001365684: | + | 723 | AGTTCTGACTGAGCCAAG |
| | | | U7:Ex8:−111 | | | |
| chr5 | 177238380 | 177238398 | NSD1:NM_001365684: | + | 724 | AAGTTCTGACTGAGCCAA |
| | | | U7:Ex8:−110 | | | |
| chr5 | 177238381 | 177238399 | NSD1:NM_001365684: | + | 725 | CAAGTTCTGACTGAGCCA |
| | | | U7:Ex8:−109 | | | |
| chr5 | 177238382 | 177238400 | NSD1:NM_001365684: | + | 726 | CCAAGTTCTGACTGAGCC |
| | | | U7:Ex8:−108 | | | |
| chr5 | 177238383 | 177238401 | NSD1:NM_001365684: | + | 727 | TCCAAGTTCTGACTGAGC |
| | | | U7:Ex8:−107 | | | |
| chr5 | 177238384 | 177238402 | NSD1:NM_001365684: | + | 728 | CTCCAAGTTCTGACTGAG |
| | | | U7:Ex8:−106 | | | |
| chr5 | 177238385 | 177238403 | NSD1:NM_001365684: | + | 729 | CCTCCAAGTTCTGACTGA |
| | | | U7:Ex8:−105 | | | |
| chr5 | 177238386 | 177238404 | NSD1:NM_001365684: | + | 730 | ACCTCCAAGTTCTGACTG |
| | | | U7:Ex8:−104 | | | |
| chr5 | 177238387 | 177238405 | NSD1:NM_001365684: | + | 731 | CACCTCCAAGTTCTGACT |
| | | | U7:Ex8:−103 | | | |
| chr5 | 177238388 | 177238406 | NSD1:NM_001365684: | + | 732 | CCACCTCCAAGTTCTGAC |
| | | | U7:Ex8:−102 | | | |
| chr5 | 177238389 | 177238407 | NSD1:NM_001365684: | + | 733 | TCCACCTCCAAGTTCTGA |
| | | | U7:Ex8:−101 | | | |
| chr5 | 177238390 | 177238408 | NSD1:NM_001365684: | + | 734 | GTCCACCTCCAAGTTCTG |
| | | | U7:Ex8:−100 | | | |
| chr5 | 177238391 | 177238409 | NSD1:NM_001365684: | + | 735 | TGTCCACCTCCAAGTTCT |
| | | | U7:Ex8:−99 | | | |
| chr5 | 177238392 | 177238410 | NSD1:NM_001365684: | + | 736 | ATGTCCACCTCCAAGTTC |
| | | | U7:Ex8:−98 | | | |
| chr5 | 177238393 | 177238411 | NSD1:NM_001365684: | + | 737 | CATGTCCACCTCCAAGTT |
| | | | U7:Ex8:−97 | | | |
| chr5 | 177238394 | 177238412 | NSD1:NM_001365684: | + | 738 | GCATGTCCACCTCCAAGT |
| | | | U7:Ex8:−96 | | | |
| chr5 | 177238395 | 177238413 | NSD1:NM_001365684: | + | 739 | AGCATGTCCACCTCCAAG |
| | | | U7:Ex8:−95 | | | |
| chr5 | 177238396 | 177238414 | NSD1:NM_001365684: | + | 740 | CAGCATGTCCACCTCCAA |
| | | | U7:Ex8:−94 | | | |
| chr5 | 177238397 | 177238415 | NSD1:NM_001365684: | + | 741 | TCAGCATGTCCACCTCCA |
| | | | U7:Ex8:−93 | | | |
| chr5 | 177238398 | 177238416 | NSD1:NM_001365684: | + | 742 | CTCAGCATGTCCACCTCC |
| | | | U7:Ex8:−92 | | | |
| chr5 | 177238399 | 177238417 | NSD1:NM_001365684: | + | 743 | ACTCAGCATGTCCACCTC |
| | | | U7:Ex8:−91 | | | |
| chr5 | 177238400 | 177238418 | NSD1:NM_001365684: | + | 744 | AACTCAGCATGTCCACCT |
| | | | U7:Ex8:−90 | | | |
| chr5 | 177238401 | 177238419 | NSD1:NM_001365684: | + | 745 | CAACTCAGCATGTCCACC |
| | | | U7:Ex8:−89 | | | |
| chr5 | 177238402 | 177238420 | NSD1:NM_001365684: | + | 746 | GCAACTCAGCATGTCCAC |
| | | | U7:Ex8:−88 | | | |
| chr5 | 177238403 | 177238421 | NSD1:NM_001365684: | + | 747 | GGCAACTCAGCATGTCCA |
| | | | U7:Ex8:−87 | | | |
| chr5 | 177238404 | 177238422 | NSD1:NM_001365684: | + | 748 | CGGCAACTCAGCATGTCC |
| | | | U7:Ex8:−86 | | | |
| chr5 | 177238405 | 177238423 | NSD1:NM_001365684: | + | 749 | GCGGCAACTCAGCATGTC |
| | | | U7:Ex8:−85 | | | |
| chr5 | 177238406 | 177238424 | NSD1:NM_001365684: | + | 750 | TGCGGCAACTCAGCATGT |
| | | | U7:Ex8:−84 | | | |
| chr5 | 177238407 | 177238425 | NSD1:NM_001365684: | + | 751 | CTGCGGCAACTCAGCATG |
| | | | U7:Ex8:−83 | | | |
| chr5 | 177238408 | 177238426 | NSD1:NM_001365684: | + | 752 | GCTGCGGCAACTCAGCAT |
| | | | U7:Ex8:−82 | | | |
| chr5 | 177238409 | 177238427 | NSD1:NM_001365684: | + | 753 | AGCTGCGGCAACTCAGCA |
| | | | U7:Ex8:−81 | | | |
| chr5 | 177238410 | 177238428 | NSD1:NM_001365684: | + | 754 | CAGCTGCGGCAACTCAGC |
| | | | U7:Ex8:−80 | | | |
| chr5 | 177238411 | 177238429 | NSD1:NM_001365684: | + | 755 | TCAGCTGCGGCAACTCAG |
| | | | U7:Ex8:−79 | | | |
| chr5 | 177238412 | 177238430 | NSD1:NM_001365684: | + | 756 | GTCAGCTGCGGCAACTCA |
| | | | U7:Ex8:−78 | | | |
| chr5 | 177238413 | 177238431 | NSD1:NM_001365684: | + | 757 | GGTCAGCTGCGGCAACTC |
| | | | U7:Ex8:−77 | | | |
| chr5 | 177238414 | 177238432 | NSD1:NM_001365684: | + | 758 | AGGTCAGCTGCGGCAACT |
| | | | U7:Ex8:−76 | | | |
| chr5 | 177238415 | 177238433 | NSD1:NM_001365684: | + | 759 | AAGGTCAGCTGCGGCAAC |
| | | | U7:Ex8:−75 | | | |
| chr5 | 177238416 | 177238434 | NSD1:NM_001365684: | + | 760 | CAAGGTCAGCTGCGGCAA |
| | | | U7:Ex8:−74 | | | |
| chr5 | 177238417 | 177238435 | NSD1:NM_001365684: | + | 761 | ACAAGGTCAGCTGCGGCA |
| | | | U7:Ex8:−73 | | | |
| chr5 | 177238418 | 177238436 | NSD1:NM_001365684: | + | 762 | GACAAGGTCAGCTGCGGC |
| | | | U7:Ex8:−72 | | | |
| chr5 | 177238419 | 177238437 | NSD1:NM_001365684: | + | 763 | AGACAAGGTCAGCTGCGG |
| | | | U7:Ex8:−71 | | | |
| chr5 | 177238420 | 177238438 | NSD1:NM_001365684: | + | 764 | CAGACAAGGTCAGCTGCG |
| | | | U7:Ex8:−70 | | | |
| chr5 | 177238421 | 177238439 | NSD1:NM_001365684: | + | 765 | ACAGACAAGGTCAGCTGC |
| | | | U7:Ex8:−69 | | | |
| chr5 | 177238422 | 177238440 | NSD1:NM_001365684: | + | 766 | CACAGACAAGGTCAGCTG |
| | | | U7:Ex8:−68 | | | |
| chr5 | 177238423 | 177238441 | NSD1:NM_001365684: | + | 767 | GCACAGACAAGGTCAGCT |
| | | | U7:Ex8:−67 | | | |
| chr5 | 177238424 | 177238442 | NSD1:NM_001365684: | + | 768 | GGCACAGACAAGGTCAGC |
| | | | U7:Ex8:−66 | | | |
| chr5 | 177238425 | 177238443 | NSD1:NM_001365684: | + | 769 | AGGCACAGACAAGGTCAG |
| | | | U7:Ex8:−65 | | | |
| chr5 | 177238426 | 177238444 | NSD1:NM_001365684: | + | 770 | CAGGCACAGACAAGGTCA |
| | | | U7:Ex8:−64 | | | |
| chr5 | 177238427 | 177238445 | NSD1:NM_001365684: | + | 771 | ACAGGCACAGACAAGGTC |
| | | | U7:Ex8:−63 | | | |
| chr5 | 177238428 | 177238446 | NSD1:NM_001365684: | + | 772 | CACAGGCACAGACAAGGT |
| | | | U7:Ex8:−62 | | | |
| chr5 | 177238429 | 177238447 | NSD1:NM_001365684: | + | 773 | CCACAGGCACAGACAAGG |
| | | | U7:Ex8:−61 | | | |
| chr5 | 177238430 | 177238448 | NSD1:NM_001365684: | + | 774 | GCCACAGGCACAGACAAG |
| | | | U7:Ex8:−60 | | | |
| chr5 | 177238431 | 177238449 | NSD1:NM_001365684: | + | 775 | AGCCACAGGCACAGACAA |
| | | | U7:Ex8:−59 | | | |
| chr5 | 177238432 | 177238450 | NSD1:NM_001365684: | + | 776 | GAGCCACAGGCACAGACA |
| | | | U7:Ex8:−58 | | | |
| chr5 | 177238433 | 177238451 | NSD1:NM_001365684: | + | 777 | GGAGCCACAGGCACAGAC |
| | | | U7:Ex8:−57 | | | |
| chr5 | 177238434 | 177238452 | NSD1:NM_001365684: | + | 778 | CGGAGCCACAGGCACAGA |
| | | | U7:Ex8:−56 | | | |
| chr5 | 177238435 | 177238453 | NSD1:NM_001365684: | + | 779 | CCGGAGCCACAGGCACAG |
| | | | U7:Ex8:−55 | | | |
| chr5 | 177238436 | 177238454 | NSD1:NM_001365684: | + | 780 | TCCGGAGCCACAGGCACA |
| | | | U7:Ex8:−54 | | | |
| chr5 | 177238437 | 177238455 | NSD1:NM_001365684: | + | 781 | TTCCGGAGCCACAGGCAC |
| | | | U7:Ex8:−53 | | | |
| chr5 | 177238438 | 177238456 | NSD1:NM_001365684: | + | 782 | CTTCCGGAGCCACAGGCA |
| | | | U7:Ex8:−52 | | | |
| chr5 | 177238439 | 177238457 | NSD1:NM_001365684: | + | 783 | ACTTCCGGAGCCACAGGC |
| | | | U7:Ex8:−51 | | | |
| chr5 | 177238440 | 177238458 | NSD1:NM_001365684: | + | 784 | GACTTCCGGAGCCACAGG |
| | | | U7:Ex8:−50 | | | |
| chr5 | 177238441 | 177238459 | NSD1:NM_001365684: | + | 785 | AGACTTCCGGAGCCACAG |
| | | | U7:Ex8:−49 | | | |
| chr5 | 177238442 | 177238460 | NSD1:NM_001365684: | + | 786 | GAGACTTCCGGAGCCACA |
| | | | U7:Ex8:−48 | | | |
| chr5 | 177238443 | 177238461 | NSD1:NM_001365684: | + | 787 | AGAGACTTCCGGAGCCAC |
| | | | U7:Ex8:−47 | | | |
| chr5 | 177238444 | 177238462 | NSD1:NM_001365684: | + | 788 | GAGAGACTTCCGGAGCCA |
| | | | U7:Ex8:−46 | | | |
| chr5 | 177238445 | 177238463 | NSD1:NM_001365684: | + | 789 | GGAGAGACTTCCGGAGCC |
| | | | U7:Ex8:−45 | | | |
| chr5 | 177238446 | 177238464 | NSD1:NM_001365684: | + | 790 | TGGAGAGACTTCCGGAGC |
| | | | U7:Ex8:−44 | | | |
| chr5 | 177238447 | 177238465 | NSD1:NM_001365684: | + | 791 | GTGGAGAGACTTCCGGAG |
| | | | U7:Ex8:−43 | | | |
| chr5 | 177238448 | 177238466 | NSD1:NM_001365684: | + | 792 | CGTGGAGAGACTTCCGGA |
| | | | U7:Ex8:−42 | | | |
| chr5 | 177238449 | 177238467 | NSD1:NM_001365684: | + | 793 | CCGTGGAGAGACTTCCGG |
| | | | U7:Ex8:−41 | | | |
| chr5 | 177238450 | 177238468 | NSD1:NM_001365684: | + | 794 | GCCGTGGAGAGACTTCCG |
| | | | U7:Ex8:−40 | | | |
| chr5 | 177238451 | 177238469 | NSD1:NM_001365684: | + | 795 | GGCCGTGGAGAGACTTCC |
| | | | U7:Ex8:−39 | | | |
| chr5 | 177238452 | 177238470 | NSD1:NM_001365684: | + | 796 | AGGCCGTGGAGAGACTTC |
| | | | U7:Ex8:−38 | | | |
| chr5 | 177238453 | 177238471 | NSD1:NM_001365684: | + | 797 | CAGGCCGTGGAGAGACTT |
| | | | U7:Ex8:−37 | | | |
| chr5 | 177238454 | 177238472 | NSD1:NM_001365684: | + | 798 | GCAGGCCGTGGAGAGACT |
| | | | U7:Ex8:−36 | | | |
| chr5 | 177238455 | 177238473 | NSD1:NM_001365684: | + | 799 | GGCAGGCCGTGGAGAGAC |
| | | | U7:Ex8:−35 | | | |
| chr5 | 177238456 | 177238474 | NSD1:NM_001365684: | + | 800 | GGGCAGGCCGTGGAGAGA |
| | | | U7:Ex8:−34 | | | |
| chr5 | 177238457 | 177238475 | NSD1:NM_001365684: | + | 801 | AGGGCAGGCCGTGGAGAG |
| | | | U7:Ex8:−33 | | | |
| chr5 | 177238458 | 177238476 | NSD1:NM_001365684: | + | 802 | AAGGGCAGGCCGTGGAGA |
| | | | U7:Ex8:−32 | | | |
| chr5 | 177238459 | 177238477 | NSD1:NM_001365684: | + | 803 | CAAGGGCAGGCCGTGGAG |
| | | | U7:Ex8:−31 | | | |
| chr5 | 177238460 | 177238478 | NSD1:NM_001365684: | + | 804 | TCAAGGGCAGGCCGTGGA |
| | | | U7:Ex8:−30 | | | |
| chr5 | 177238461 | 177238479 | NSD1:NM_001365684: | + | 805 | CTCAAGGGCAGGCCGTGG |
| | | | U7:Ex8:−29 | | | |
| chr5 | 177238462 | 177238480 | NSD1:NM_001365684: | + | 806 | ACTCAAGGGCAGGCCGTG |
| | | | U7:Ex8:−28 | | | |
| chr5 | 177238463 | 177238481 | NSD1:NM_001365684: | + | 807 | GACTCAAGGGCAGGCCGT |
| | | | U7:Ex8:−27 | | | |
| chr5 | 177238464 | 177238482 | NSD1:NM_001365684: | + | 808 | AGACTCAAGGGCAGGCCG |
| | | | U7:Ex8:−26 | | | |
| chr5 | 177238465 | 177238483 | NSD1:NM_001365684: | + | 809 | CAGACTCAAGGGCAGGCC |
| | | | U7:Ex8:−25 | | | |
| chr5 | 177238466 | 177238484 | NSD1:NM_001365684: | + | 810 | TCAGACTCAAGGGCAGGC |
| | | | U7:Ex8:−24 | | | |
| chr5 | 177238467 | 177238485 | NSD1:NM_001365684: | + | 811 | CTCAGACTCAAGGGCAGG |
| | | | U7:Ex8:−23 | | | |
| chr5 | 177238468 | 177238486 | NSD1:NM_001365684: | + | 812 | CCTCAGACTCAAGGGCAG |
| | | | U7:Ex8:−22 | | | |
| chr5 | 177238469 | 177238487 | NSD1:NM_001365684: | + | 813 | TCCTCAGACTCAAGGGCA |
| | | | U7:Ex8:−21 | | | |
| chr5 | 177238470 | 177238488 | NSD1:NM_001365684: | + | 814 | TTCCTCAGACTCAAGGGC |
| | | | U7:Ex8:−20 | | | |
| chr5 | 177238471 | 177238489 | NSD1:NM_001365684: | + | 815 | ATTCCTCAGACTCAAGGG |
| | | | U7:Ex8:−19 | | | |
| chr5 | 177238472 | 177238490 | NSD1:NM_001365684: | + | 816 | AATTCCTCAGACTCAAGG |
| | | | U7:Ex8:−18 | | | |
| chr5 | 177238473 | 177238491 | NSD1:NM_001365684: | + | 817 | CAATTCCTCAGACTCAAG |
| | | | U7:Ex8:−17 | | | |
| chr5 | 177238474 | 177238492 | NSD1:NM_001365684: | + | 818 | GCAATTCCTCAGACTCAA |
| | | | U7:Ex8:−16 | | | |
| chr5 | 177238475 | 177238493 | NSD1:NM_001365684: | + | 819 | AGCAATTCCTCAGACTCA |
| | | | U7:Ex8:−15 | | | |
| chr5 | 177238476 | 177238494 | NSD1:NM_001365684: | + | 820 | TAGCAATTCCTCAGACTC |
| | | | U7:Ex8:−14 | | | |
| chr5 | 177238477 | 177238495 | NSD1:NM_001365684: | + | 821 | CTAGCAATTCCTCAGACT |
| | | | U7:Ex8:−13 | | | |
| chr5 | 177238478 | 177238496 | NSD1:NM_001365684: | + | 822 | ACTAGCAATTCCTCAGAC |
| | | | U7:Ex8:−12 | | | |
| chr5 | 177238479 | 177238497 | NSD1:NM_001365684: | + | 823 | AACTAGCAATTCCTCAGA |
| | | | U7:Ex8:−11 | | | |
| chr5 | 177238480 | 177238498 | NSD1:NM_001365684: | + | 824 | TAACTAGCAATTCCTCAG |
| | | | U7:Ex8:−10 | | | |
| chr5 | 177238481 | 177238499 | NSD1:NM_001365684: | + | 825 | TTAACTAGCAATTCCTCA |
| | | | U7:Ex8:−9 | | | |
| chr5 | 177238482 | 177238500 | NSD1:NM_001365684: | + | 826 | TTTAACTAGCAATTCCTC |
| | | | U7:Ex8:−8 | | | |
| chr5 | 177238483 | 177238501 | NSD1:NM_001365684: | + | 827 | TTTTAACTAGCAATTCCT |
| | | | U7:Ex8:−7 | | | |
| chr5 | 177238484 | 177238502 | NSD1:NM_001365684: | + | 828 | GTTTTAACTAGCAATTCC |
| | | | U7:Ex8:−6 | | | |
| chr5 | 177238485 | 177238503 | NSD1:NM_001365684: | + | 829 | CGTTTTAACTAGCAATTC |
| | | | U7:Ex8:−5 | | | |
| chr5 | 177238514 | 177238532 | NSD1:NM_001365684: | + | 830 | TACTGAGACCCCAACCCC |
| | | | U7:IVS8:8 | | | |
| chr5 | 177238515 | 177238533 | NSD1:NM_001365684: | + | 831 | ATACTGAGACCCCAACCC |
| | | | U7:IVS8:9 | | | |
| chr5 | 177238516 | 177238534 | NSD1:NM_001365684: | + | 832 | AATACTGAGACCCCAACC |
| | | | U7:IVS8:10 | | | |
| chr5 | 177238517 | 177238535 | NSD1:NM_001365684: | + | 833 | AAATACTGAGACCCCAAC |
| | | | U7:IVS8:11 | | | |
| chr5 | 177238518 | 177238536 | NSD1:NM_001365684: | + | 834 | CAAATACTGAGACCCCAA |
| | | | U7:IVS8:12 | | | |
| chr5 | 177238519 | 177238537 | NSD1:NM_001365684: | + | 835 | TCAAATACTGAGACCCCA |
| | | | U7:IVS8:13 | | | |
| chr5 | 177238520 | 177238538 | NSD1:NM_001365684: | + | 836 | CTCAAATACTGAGACCCC |
| | | | U7:IVS8:14 | | | |
| chr5 | 177238521 | 177238539 | NSD1:NM_001365684: | + | 837 | GCTCAAATACTGAGACCC |
| | | | U7:IVS8:15 | | | |
| chr5 | 177238522 | 177238540 | NSD1:NM_001365684: | + | 838 | TGCTCAAATACTGAGACC |
| | | | U7:IVS8:16 | | | |
| chr5 | 177238523 | 177238541 | NSD1:NM_001365684: | + | 839 | CTGCTCAAATACTGAGAC |
| | | | U7:IVS8:17 | | | |
| chr5 | 177238524 | 177238542 | NSD1:NM_001365684: | + | 840 | TCTGCTCAAATACTGAGA |
| | | | U7:IVS8:18 | | | |
| chr5 | 177238525 | 177238543 | NSD1:NM_001365684: | + | 841 | ATCTGCTCAAATACTGAG |
| | | | U7:IVS8:19 | | | |
| chr5 | 177238526 | 177238544 | NSD1:NM_001365684: | + | 842 | TATCTGCTCAAATACTGA |
| | | | U7:IVS8:20 | | | |
| chr5 | 177238527 | 177238545 | NSD1:NM_001365684: | + | 843 | ATATCTGCTCAAATACTG |
| | | | U7:IVS8:21 | | | |
| chr5 | 177238528 | 177238546 | NSD1:NM_001365684: | + | 844 | CATATCTGCTCAAATACT |
| | | | U7:IVS8:22 | | | |
| chr5 | 177238529 | 177238547 | NSD1:NM_001365684: | + | 845 | TCATATCTGCTCAAATAC |
| | | | U7:IVS8:23 | | | |
| chr5 | 177238530 | 177238548 | NSD1:NM_001365684: | + | 846 | ATCATATCTGCTCAAATA |
| | | | U7:IVS8:24 | | | |
| chr5 | 177238531 | 177238549 | NSD1:NM_001365684: | + | 847 | AATCATATCTGCTCAAAT |
| | | | U7:IVS8:25 | | | |
| chr5 | 177238532 | 177238550 | NSD1:NM_001365684: | + | 848 | TAATCATATCTGCTCAAA |
| | | | U7:IVS8:26 | | | |
| chr5 | 177238533 | 177238551 | NSD1:NM_001365684: | + | 849 | CTAATCATATCTGCTCAA |
| | | | U7:IVS8:27 | | | |
| chr5 | 177238534 | 177238552 | NSD1:NM_001365684: | + | 850 | TCTAATCATATCTGCTCA |
| | | | U7:IVS8:28 | | | |
| chr5 | 177238535 | 177238553 | NSD1:NM_001365684: | + | 851 | CTCTAATCATATCTGCTC |
| | | | U7:IVS8:29 | | | |
| chr5 | 177238536 | 177238554 | NSD1:NM_001365684: | + | 852 | CCTCTAATCATATCTGCT |
| | | | U7:IVS8:30 | | | |
| chr5 | 177238537 | 177238555 | NSD1:NM_001365684: | + | 853 | TCCTCTAATCATATCTGC |
| | | | U7:IVS8:31 | | | |
| chr5 | 177238538 | 177238556 | NSD1:NM_001365684: | + | 854 | TTCCTCTAATCATATCTG |
| | | | U7:IVS8:32 | | | |
| chr5 | 177238539 | 177238557 | NSD1:NM_001365684: | + | 855 | CTTCCTCTAATCATATCT |
| | | | U7:IVS8:33 | | | |
| chr5 | 177238540 | 177238558 | NSD1:NM_001365684: | + | 856 | GCTTCCTCTAATCATATC |
| | | | U7:IVS8:34 | | | |
| chr5 | 177238541 | 177238559 | NSD1:NM_001365684: | + | 857 | TGCTTCCTCTAATCATAT |
| | | | U7:IVS8:35 | | | |
| chr5 | 177238542 | 177238560 | NSD1:NM_001365684: | + | 858 | CTGCTTCCTCTAATCATA |
| | | | U7:IVS8:36 | | | |
| chr5 | 177238543 | 177238561 | NSD1:NM_001365684: | + | 859 | CCTGCTTCCTCTAATCAT |
| | | | U7:IVS8:37 | | | |
| chr5 | 177238544 | 177238562 | NSD1:NM_001365684: | + | 860 | TCCTGCTTCCTCTAATCA |
| | | | U7:IVS8:38 | | | |
| chr5 | 177238545 | 177238563 | NSD1:NM_001365684: | + | 861 | CTCCTGCTTCCTCTAATC |
| | | | U7:IVS8:39 | | | |
| chr5 | 177238546 | 177238564 | NSD1:NM_001365684: | + | 862 | TCTCCTGCTTCCTCTAAT |
| | | | U7:IVS8:40 | | | |
| chr5 | 177238547 | 177238565 | NSD1:NM_001365684: | + | 863 | ATCTCCTGCTTCCTCTAA |
| | | | U7:IVS8:41 | | | |
| chr5 | 177238548 | 177238566 | NSD1:NM_001365684: | + | 864 | AATCTCCTGCTTCCTCTA |
| | | | U7:IVS8:42 | | | |
| chr5 | 177238549 | 177238567 | NSD1:NM_001365684: | + | 865 | AAATCTCCTGCTTCCTCT |
| | | | U7:IVS8:43 | | | |
| chr5 | 177238550 | 177238568 | NSD1:NM_001365684: | + | 866 | AAAATCTCCTGCTTCCTC |
| | | | U7:IVS8:44 | | | |
| chr5 | 177238551 | 177238569 | NSD1:NM_001365684: | + | 867 | TAAAATCTCCTGCTTCCT |
| | | | U7:IVS8:45 | | | |
| chr5 | 177238552 | 177238570 | NSD1:NM_001365684: | + | 868 | CTAAAATCTCCTGCTTCC |
| | | | U7:IVS8:46 | | | |
| chr5 | 177238553 | 177238571 | NSD1:NM_001365684: | + | 869 | ACTAAAATCTCCTGCTTC |
| | | | U7:IVS8:47 | | | |
| chr5 | 177238554 | 177238572 | NSD1:NM_001365684: | + | 870 | TACTAAAATCTCCTGCTT |
| | | | U7:IVS8:48 | | | |
| chr5 | 177238555 | 177238573 | NSD1:NM_001365684: | + | 871 | ATACTAAAATCTCCTGCT |
| | | | U7:IVS8:49 | | | |
| chr5 | 177238556 | 177238574 | NSD1:NM_001365684: | + | 872 | CATACTAAAATCTCCTGC |
| | | | U7:IVS8:50 | | | |
| chr5 | 177238557 | 177238575 | NSD1:NM_001365684: | + | 873 | ACATACTAAAATCTCCTG |
| | | | U7:IVS8:51 | | | |
| chr5 | 177238558 | 177238576 | NSD1:NM_001365684: | + | 874 | AACATACTAAAATCTCCT |
| | | | U7:IVS8:52 | | | |
| chr5 | 177238559 | 177238577 | NSD1:NM_001365684: | + | 875 | AAACATACTAAAATCTCC |
| | | | U7:IVS8:53 | | | |
| chr5 | 177238560 | 177238578 | NSD1:NM_001365684: | + | 876 | AAAACATACTAAAATCTC |
| | | | U7:IVS8:54 | | | |
| chr5 | 177238561 | 177238579 | NSD1:NM_001365684: | + | 877 | CAAAACATACTAAAATCT |
| | | | U7:IVS8:55 | | | |
| chr5 | 177238562 | 177238580 | NSD1:NM_001365684: | + | 878 | TCAAAACATACTAAAATC |
| | | | U7:IVS8:56 | | | |
| chr5 | 177238563 | 177238581 | NSD1:NM_001365684: | + | 879 | ATCAAAACATACTAAAAT |
| | | | U7:IVS8:57 | | | |
| chr5 | 177238564 | 177238582 | NSD1:NM_001365684: | + | 880 | CATCAAAACATACTAAAA |
| | | | U7:IVS8:58 | | | |
| chr5 | 177238565 | 177238583 | NSD1:NM_001365684: | + | 881 | ACATCAAAACATACTAAA |
| | | | U7:IVS8:59 | | | |
| chr5 | 177238566 | 177238584 | NSD1:NM_001365684: | + | 882 | TACATCAAAACATACTAA |
| | | | U7:IVS8:60 | | | |
| chr5 | 177238567 | 177238585 | NSD1:NM_001365684: | + | 883 | TTACATCAAAACATACTA |
| | | | U7:IVS8:61 | | | |
| chr5 | 177238568 | 177238586 | NSD1:NM_001365684: | + | 884 | TTTACATCAAAACATACT |
| | | | U7:IVS8:62 | | | |
| chr5 | 177238569 | 177238587 | NSD1:NM_001365684: | + | 885 | CTTTACATCAAAACATAC |
| | | | U7:IVS8:63 | | | |
| chr5 | 177238570 | 177238588 | NSD1:NM_001365684: | + | 886 | GCTTTACATCAAAACATA |
| | | | U7:IVS8:64 | | | |
| chr5 | 177238571 | 177238589 | NSD1:NM_001365684: | + | 887 | GGCTTTACATCAAAACAT |
| | | | U7:IVS8:65 | | | |
| chr5 | 177238572 | 177238590 | NSD1:NM_001365684: | + | 888 | TGGCTTTACATCAAAACA |
| | | | U7:IVS8:66 | | | |
| chr5 | 177238573 | 177238591 | NSD1:NM_001365684: | + | 889 | TTGGCTTTACATCAAAAC |
| | | | U7:IVS8:67 | | | |
| chr5 | 177238574 | 177238592 | NSD1:NM_001365684: | + | 890 | GTTGGCTTTACATCAAAA |
| | | | U7:IVS8:68 | | | |
| chr5 | 177238575 | 177238593 | NSD1:NM_001365684: | + | 891 | TGTTGGCTTTACATCAAA |
| | | | U7:IVS8:69 | | | |
| chr5 | 177238576 | 177238594 | NSD1:NM_001365684: | + | 892 | ATGTTGGCTTTACATCAA |
| | | | U7:IVS8:70 | | | |
| chr5 | 177238577 | 177238595 | NSD1:NM_001365684: | + | 893 | AATGTTGGCTTTACATCA |
| | | | U7:IVS8:71 | | | |
| chr5 | 177238578 | 177238596 | NSD1:NM_001365684: | + | 894 | CAATGTTGGCTTTACATC |
| | | | U7:IVS8:72 | | | |
| chr5 | 177238579 | 177238597 | NSD1:NM_001365684: | + | 895 | ACAATGTTGGCTTTACAT |
| | | | U7:IVS8:73 | | | |
| chr5 | 177238580 | 177238598 | NSD1:NM_001365684: | + | 896 | TACAATGTTGGCTTTACA |
| | | | U7:IVS8:74 | | | |
| chr5 | 177238581 | 177238599 | NSD1:NM_001365684: | + | 897 | ATACAATGTTGGCTTTAC |
| | | | U7:IVS8:75 | | | |
| chr5 | 177238582 | 177238600 | NSD1:NM_001365684: | + | 898 | GATACAATGTTGGCTTTA |
| | | | U7:IVS8:76 | | | |
| chr5 | 177238583 | 177238601 | NSD1:NM_001365684: | + | 899 | AGATACAATGTTGGCTTT |
| | | | U7:IVS8:77 | | | |
| chr5 | 177238584 | 177238602 | NSD1:NM_001365684: | + | 900 | TAGATACAATGTTGGCTT |
| | | | U7:IVS8:78 | | | |
| chr5 | 177238585 | 177238603 | NSD1:NM_001365684: | + | 901 | ATAGATACAATGTTGGCT |
| | | | U7:IVS8:79 | | | |
| chr5 | 177238586 | 177238604 | NSD1:NM_001365684: | + | 902 | TATAGATACAATGTTGGC |
| | | | U7:IVS8:80 | | | |
| chr5 | 177238587 | 177238605 | NSD1:NM_001365684: | + | 903 | ATATAGATACAATGTTGG |
| | | | U7:IVS8:81 | | | |
| chr5 | 177238588 | 177238606 | NSD1:NM_001365684: | + | 904 | TATATAGATACAATGTTG |
| | | | U7:IVS8:82 | | | |
| chr5 | 177238589 | 177238607 | NSD1:NM_001365684: | + | 905 | GTATATAGATACAATGTT |
| | | | U7:IVS8:83 | | | |
| chr5 | 177238590 | 177238608 | NSD1:NM_001365684: | + | 906 | TGTATATAGATACAATGT |
| | | | U7:IVS8:84 | | | |
| chr5 | 177238591 | 177238609 | NSD1:NM_001365684: | + | 907 | TTGTATATAGATACAATG |
| | | | U7:IVS8:85 | | | |
| chr5 | 177238592 | 177238610 | NSD1:NM_001365684: | + | 908 | ATTGTATATAGATACAAT |
| | | | U7:IVS8:86 | | | |
| chr5 | 177238593 | 177238611 | NSD1:NM_001365684: | + | 909 | TATTGTATATAGATACAA |
| | | | U7:IVS8:87 | | | |
| chr5 | 177238594 | 177238612 | NSD1:NM_001365684: | + | 910 | TTATTGTATATAGATACA |
| | | | U7:IVS8:88 | | | |
| chr5 | 177238595 | 177238613 | NSD1:NM_001365684: | + | 911 | TTTATTGTATATAGATAC |
| | | | U7:IVS8:89 | | | |
| chr5 | 177238596 | 177238614 | NSD1:NM_001365684: | + | 912 | GTTTATTGTATATAGATA |
| | | | U7:IVS8:90 | | | |
| chr5 | 177238597 | 177238615 | NSD1:NM_001365684: | + | 913 | AGTTTATTGTATATAGAT |
| | | | U7:IVS8:91 | | | |
| chr5 | 177238598 | 177238616 | NSD1:NM_001365684: | + | 914 | TAGTTTATTGTATATAGA |
| | | | U7:IVS8:92 | | | |
| chr5 | 177238599 | 177238617 | NSD1:NM_001365684: | + | 915 | GTAGTTTATTGTATATAG |
| | | | U7:IVS8:93 | | | |
| chr5 | 177238600 | 177238618 | NSD1:NM_001365684: | + | 916 | GGTAGTTTATTGTATATA |
| | | | U7:IVS8:94 | | | |
| chr5 | 177238601 | 177238619 | NSD1:NM_001365684: | + | 917 | GGGTAGTTTATTGTATAT |
| | | | U7:IVS8:95 | | | |
| chr5 | 177238602 | 177238620 | NSD1:NM_001365684: | + | 918 | GGGGTAGTTTATTGTATA |
| | | | U7:IVS8:96 | | | |
| chr5 | 177238603 | 177238621 | NSD1:NM_001365684: | + | 919 | GGGGGTAGTTTATTGTAT |
| | | | U7:IVS8:97 | | | |
| chr5 | 177238604 | 177238622 | NSD1:NM_001365684: | + | 920 | AGGGGGTAGTTTATTGTA |
| | | | U7:IVS8:98 | | | |
| chr5 | 177238605 | 177238623 | NSD1:NM_001365684: | + | 921 | AAGGGGGTAGTTTATTGT |
| | | | U7:IVS8:99 | | | |
| chr5 | 177238606 | 177238624 | NSD1:NM_001365684: | + | 922 | AAAGGGGGTAGTTTATTG |
| | | | U7:IVS8:100 | | | |
| chr5 | 177238607 | 177238625 | NSD1:NM_001365684: | + | 923 | AAAAGGGGGTAGTTTATT |
| | | | U7:IVS8:101 | | | |
| chr5 | 177238608 | 177238626 | NSD1:NM_001365684: | + | 924 | CAAAAGGGGGTAGTTTAT |
| | | | U7:IVS8:102 | | | |
| chr5 | 177238609 | 177238627 | NSD1:NM_001365684: | + | 925 | ACAAAAGGGGGTAGTTTA |
| | | | U7:IVS8:103 | | | |

TABLE 5B-1
Exemplary ASO Sequences

| | | | | SEQ ID | |
|---|---|---|---|---|---|
| chr | Start | End | Strand | NO: | ASO sequence |
| chr5 | 177238118 | 177238136 | + | 926 | AAGGCTACAAAAAGTGGATG |
| chr5 | 177238119 | 177238137 | + | 927 | AAGGCTACAAAAAGTGGAT |
| chr5 | 177238120 | 177238138 | + | 928 | AAGGCTACAAAAAGTGGA |
| chr5 | 177238121 | 177238139 | + | 929 | AAAGGCTACAAAAAGTGG |
| chr5 | 177238122 | 177238140 | + | 930 | AACAAAGGCTACAAAAAGTG |
| chr5 | 177238123 | 177238141 | + | 931 | AACAAAGGCTACAAAAAGT |
| chr5 | 177238124 | 177238142 | + | 932 | AAGACAAAGGCTACAAAAAG |
| chr5 | 177238125 | 177238143 | + | 933 | AATGACAAAGGCTACAAAAA |
| chr5 | 177238126 | 177238144 | + | 934 | AACTGACAAAGGCTACAAAA |
| chr5 | 177238127 | 177238145 | + | 935 | AATCTGACAAAGGCTACAAA |
| chr5 | 177238128 | 177238146 | + | 936 | AATTCTGACAAAGGCTACAA |
| chr5 | 177238129 | 177238147 | + | 937 | AATTCTGACAAAGGCTACA |
| chr5 | 177238130 | 177238148 | + | 938 | AATTCTGACAAAGGCTAC |
| chr5 | 177238131 | 177238149 | + | 939 | AAATTCTGACAAAGGCTA |
| chr5 | 177238132 | 177238150 | + | 940 | AAGAAATTCTGACAAAGGCT |
| chr5 | 177238133 | 177238151 | + | 941 | AATGAAATTCTGACAAAGGC |
| chr5 | 177238134 | 177238152 | + | 942 | AATGAAATTCTGACAAAGG |
| chr5 | 177238135 | 177238153 | + | 943 | AATGAAATTCTGACAAAG |
| chr5 | 177238136 | 177238154 | + | 944 | AAGAATGAAATTCTGACAAA |
| chr5 | 177238137 | 177238155 | + | 945 | AAGGAATGAAATTCTGACAA |
| chr5 | 177238138 | 177238156 | + | 946 | AAGGAATGAAATTCTGACA |
| chr5 | 177238139 | 177238157 | + | 947 | AAGGAATGAAATTCTGAC |
| chr5 | 177238140 | 177238158 | + | 948 | AAAGGAATGAAATTCTGA |
| chr5 | 177238141 | 177238159 | + | 949 | AAAAGGAATGAAATTCTG |
| chr5 | 177238142 | 177238160 | + | 950 | AATAAAAGGAATGAAATTCT |
| chr5 | 177238143 | 177238161 | + | 951 | AATTAAAAGGAATGAAATTC |
| chr5 | 177238144 | 177238162 | + | 952 | AATTTAAAAGGAATGAAATT |
| chr5 | 177238145 | 177238163 | + | 953 | AACTTTAAAAGGAATGAAAT |
| chr5 | 177238146 | 177238164 | + | 954 | AACTTTAAAAGGAATGAAA |
| chr5 | 177238147 | 177238165 | + | 955 | CACTTTAAAAGGAATGAA |
| chr5 | 177238148 | 177238166 | + | 956 | AACACTTTAAAAGGAATGA |
| chr5 | 177238149 | 177238167 | + | 957 | AACACACTTTAAAAGGAATG |
| chr5 | 177238150 | 177238168 | + | 958 | AACACACTTTAAAAGGAAT |
| chr5 | 177238151 | 177238169 | + | 959 | AACACACTTTAAAAGGAA |
| chr5 | 177238152 | 177238170 | + | 960 | AATAACACACTTTAAAAGGA |
| chr5 | 177238153 | 177238171 | + | 961 | AATAACACACTTTAAAAGG |
| chr5 | 177238154 | 177238172 | + | 962 | AATAACACACTTTAAAAG |
| chr5 | 177238155 | 177238173 | + | 963 | AAGAATAACACACTTTAAAA |
| chr5 | 177238156 | 177238174 | + | 964 | AAGAATAACACACTTTAAA |
| chr5 | 177238157 | 177238175 | + | 965 | AAGAATAACACACTTTAA |
| chr5 | 177238158 | 177238176 | + | 966 | AAAGAATAACACACTTTA |
| chr5 | 177238159 | 177238177 | + | 967 | AAAAGAATAACACACTTT |
| chr5 | 177238160 | 177238178 | + | 968 | AAAAAGAATAACACACTT |
| chr5 | 177238161 | 177238179 | + | 969 | AACAAAAAGAATAACACACT |
| chr5 | 177238162 | 177238180 | + | 970 | AATCAAAAAGAATAACACAC |
| chr5 | 177238163 | 177238181 | + | 971 | AAGTCAAAAAGAATAACACA |
| chr5 | 177238164 | 177238182 | + | 972 | AATGTCAAAAAGAATAACAC |
| chr5 | 177238165 | 177238183 | + | 973 | AAGTGTCAAAAAGAATAACA |
| chr5 | 177238166 | 177238184 | + | 974 | AAGTGTCAAAAAGAATAAC |
| chr5 | 177238167 | 177238185 | + | 975 | AAGTGTCAAAAAGAATAA |
| chr5 | 177238168 | 177238186 | + | 976 | AATAAGTGTCAAAAAGAATA |
| chr5 | 177238169 | 177238187 | + | 977 | AATTAAGTGTCAAAAAGAAT |
| chr5 | 177238170 | 177238188 | + | 978 | AATTTAAGTGTCAAAAAGAA |
| chr5 | 177238171 | 177238189 | + | 979 | AATTTAAGTGTCAAAAAGA |
| chr5 | 177238172 | 177238190 | + | 980 | AATTTAAGTGTCAAAAAG |
| chr5 | 177238173 | 177238191 | + | 981 | AATAATTTAAGTGTCAAAAA |
| chr5 | 177238174 | 177238192 | + | 982 | AAGTAATTTAAGTGTCAAAA |
| chr5 | 177238175 | 177238193 | + | 983 | AATGTAATTTAAGTGTCAAA |
| chr5 | 177238176 | 177238194 | + | 984 | AATTGTAATTTAAGTGTCAA |
| chr5 | 177238177 | 177238195 | + | 985 | AAGTTGTAATTTAAGTGTCA |
| chr5 | 177238178 | 177238196 | + | 986 | AATGTTGTAATTTAAGTGTC |
| chr5 | 177238179 | 177238197 | + | 987 | AATTGTTGTAATTTAAGTGT |
| chr5 | 177238180 | 177238198 | + | 988 | AATTGTTGTAATTTAAGTG |
| chr5 | 177238181 | 177238199 | + | 989 | AATTGTTGTAATTTAAGT |
| chr5 | 177238182 | 177238200 | + | 990 | AAATTGTTGTAATTTAAG |
| chr5 | 177238183 | 177238201 | + | 991 | AAAATTGTTGTAATTTAA |
| chr5 | 177238184 | 177238202 | + | 992 | AACAAAATTGTTGTAATTTA |
| chr5 | 177238185 | 177238203 | + | 993 | AACCAAAATTGTTGTAATTT |
| chr5 | 177238186 | 177238204 | + | 994 | AAGCCAAAATTGTTGTAATT |
| chr5 | 177238187 | 177238205 | + | 995 | AAGGCCAAAATTGTTGTAAT |
| chr5 | 177238188 | 177238206 | + | 996 | AAGGCCAAAATTGTTGTAA |
| chr5 | 177238189 | 177238207 | + | 997 | AACAGGCCAAAATTGTTGTA |
| chr5 | 177238190 | 177238208 | + | 998 | AACAGGCCAAAATTGTTGT |
| chr5 | 177238191 | 177238209 | + | 999 | AACACAGGCCAAAATTGTTG |
| chr5 | 177238192 | 177238210 | + | 1000 | AACCACAGGCCAAAATTGTT |
| chr5 | 177238193 | 177238211 | + | 1001 | AATCCACAGGCCAAAATTGT |
| chr5 | 177238194 | 177238212 | + | 1002 | AAGTCCACAGGCCAAAATTG |
| chr5 | 177238195 | 177238213 | + | 1003 | AAGTCCACAGGCCAAAATT |
| chr5 | 177238196 | 177238214 | + | 1004 | AAGAGTCCACAGGCCAAAAT |
| chr5 | 177238197 | 177238215 | + | 1005 | AAGAGTCCACAGGCCAAAA |
| chr5 | 177238198 | 177238216 | + | 1006 | AATAGAGTCCACAGGCCAAA |
| chr5 | 177238199 | 177238217 | + | 1007 | AATAGAGTCCACAGGCCAA |
| chr5 | 177238200 | 177238218 | + | 1008 | AATAGAGTCCACAGGCCA |
| chr5 | 177238201 | 177238219 | + | 1009 | AAATAGAGTCCACAGGCC |
| chr5 | 177238202 | 177238220 | + | 1010 | AAAATAGAGTCCACAGGC |
| chr5 | 177238237 | 177238255 | + | 1011 | AACTTCACAGCGGGAACTTA |
| chr5 | 177238238 | 177238256 | + | 1012 | AATCTTCACAGCGGGAACTT |
| chr5 | 177238239 | 177238257 | + | 1013 | AACTCTTCACAGCGGGAACT |
| chr5 | 177238240 | 177238258 | + | 1014 | AACCTCTTCACAGCGGGAAC |
| chr5 | 177238241 | 177238259 | + | 1015 | AATCCTCTTCACAGCGGGAA |
| chr5 | 177238242 | 177238260 | + | 1016 | AATTCCTCTTCACAGCGGGA |
| chr5 | 177238243 | 177238261 | + | 1017 | AATTTCCTCTTCACAGCGGG |
| chr5 | 177238244 | 177238262 | + | 1018 | AACTTTCCTCTTCACAGCGG |
| chr5 | 177238245 | 177238263 | + | 1019 | AAGCTTTCCTCTTCACAGCG |
| chr5 | 177238246 | 177238264 | + | 1020 | AAGGCTTTCCTCTTCACAGC |
| chr5 | 177238247 | 177238265 | + | 1021 | AAGGCTTTCCTCTTCACAG |
| chr5 | 177238248 | 177238266 | + | 1022 | AAGGCTTTCCTCTTCACA |
| chr5 | 177238249 | 177238267 | + | 1023 | AAGAAGGCTTTCCTCTTCAC |
| chr5 | 177238250 | 177238268 | + | 1024 | AAGAAGGCTTTCCTCTTCA |
| chr5 | 177238251 | 177238269 | + | 1025 | AATAGAAGGCTTTCCTCTTC |
| chr5 | 177238252 | 177238270 | + | 1026 | AACTAGAAGGCTTTCCTCTT |
| chr5 | 177238253 | 177238271 | + | 1027 | AAGCTAGAAGGCTTTCCTCT |
| chr5 | 177238254 | 177238272 | + | 1028 | AAGGCTAGAAGGCTTTCCTC |
| chr5 | 177238255 | 177238273 | + | 1029 | AAGGGCTAGAAGGCTTTCCT |
| chr5 | 177238256 | 177238274 | + | 1030 | AACGGGCTAGAAGGCTTTCC |
| chr5 | 177238257 | 177238275 | + | 1031 | AATCGGGCTAGAAGGCTTTC |
| chr5 | 177238258 | 177238276 | + | 1032 | AACTCGGGCTAGAAGGCTTT |
| chr5 | 177238259 | 177238277 | + | 1033 | AACCTCGGGCTAGAAGGCTT |
| chr5 | 177238260 | 177238278 | + | 1034 | AACCTCGGGCTAGAAGGCT |
| chr5 | 177238261 | 177238279 | + | 1035 | AAGACCTCGGGCTAGAAGGC |
| chr5 | 177238262 | 177238280 | + | 1036 | AACGACCTCGGGCTAGAAGG |
| chr5 | 177238263 | 177238281 | + | 1037 | AATCGACCTCGGGCTAGAAG |
| chr5 | 177238264 | 177238282 | + | 1038 | AATCGACCTCGGGCTAGAA |
| chr5 | 177238265 | 177238283 | + | 1039 | AAGATCGACCTCGGGCTAGA |
| chr5 | 177238266 | 177238284 | + | 1040 | AAGATCGACCTCGGGCTAG |
| chr5 | 177238267 | 177238285 | + | 1041 | AATAGATCGACCTCGGGCTA |
| chr5 | 177238268 | 177238286 | + | 1042 | AACTAGATCGACCTCGGGCT |
| chr5 | 177238269 | 177238287 | + | 1043 | AACTAGATCGACCTCGGGC |
| chr5 | 177238270 | 177238288 | + | 1044 | AACACTAGATCGACCTCGGG |
| chr5 | 177238271 | 177238289 | + | 1045 | AAGCACTAGATCGACCTCGG |
| chr5 | 177238272 | 177238290 | + | 1046 | AAGCACTAGATCGACCTCG |
| chr5 | 177238273 | 177238291 | + | 1047 | AAGAGCACTAGATCGACCTC |
| chr5 | 177238274 | 177238292 | + | 1048 | AATGAGCACTAGATCGACCT |
| chr5 | 177238275 | 177238293 | + | 1049 | AACTGAGCACTAGATCGACC |
| chr5 | 177238276 | 177238294 | + | 1050 | AATCTGAGCACTAGATCGAC |
| chr5 | 177238277 | 177238295 | + | 1051 | AATTCTGAGCACTAGATCGA |
| chr5 | 177238278 | 177238296 | + | 1052 | AAGTTCTGAGCACTAGATCG |
| chr5 | 177238279 | 177238297 | + | 1053 | AATGTTCTGAGCACTAGATC |
| chr5 | 177238280 | 177238298 | + | 1054 | AATTGTTCTGAGCACTAGAT |
| chr5 | 177238281 | 177238299 | + | 1055 | AACTTGTTCTGAGCACTAGA |
| chr5 | 177238282 | 177238300 | + | 1056 | AAGCTTGTTCTGAGCACTAG |
| chr5 | 177238283 | 177238301 | + | 1057 | AATGCTTGTTCTGAGCACTA |
| chr5 | 177238284 | 177238302 | + | 1058 | AACTGCTTGTTCTGAGCACT |
| chr5 | 177238285 | 177238303 | + | 1059 | AACCTGCTTGTTCTGAGCAC |
| chr5 | 177238286 | 177238304 | + | 1060 | AACCTGCTTGTTCTGAGCA |
| chr5 | 177238287 | 177238305 | + | 1061 | AACACCTGCTTGTTCTGAGC |
| chr5 | 177238288 | 177238306 | + | 1062 | AACCACCTGCTTGTTCTGAG |
| chr5 | 177238289 | 177238307 | + | 1063 | AATCCACCTGCTTGTTCTGA |
| chr5 | 177238290 | 177238308 | + | 1064 | AAGTCCACCTGCTTGTTCTG |
| chr5 | 177238291 | 177238309 | + | 1065 | AACGTCCACCTGCTTGTTCT |
| chr5 | 177238292 | 177238310 | + | 1066 | AATCGTCCACCTGCTTGTTC |
| chr5 | 177238293 | 177238311 | + | 1067 | AACTCGTCCACCTGCTTGTT |
| chr5 | 177238294 | 177238312 | + | 1068 | AATCTCGTCCACCTGCTTGT |
| chr5 | 177238295 | 177238313 | + | 1069 | AATTCTCGTCCACCTGCTTG |
| chr5 | 177238296 | 177238314 | + | 1070 | AATTCTCGTCCACCTGCTT |
| chr5 | 177238297 | 177238315 | + | 1071 | AATTCTCGTCCACCTGCT |
| chr5 | 177238298 | 177238316 | + | 1072 | AAGAATTCTCGTCCACCTGC |
| chr5 | 177238299 | 177238317 | + | 1073 | AAGAATTCTCGTCCACCTG |
| chr5 | 177238300 | 177238318 | + | 1074 | AAGAATTCTCGTCCACCT |
| chr5 | 177238301 | 177238319 | + | 1075 | AAAGAATTCTCGTCCACC |
| chr5 | 177238302 | 177238320 | + | 1076 | AACAAAGAATTCTCGTCCAC |
| chr5 | 177238303 | 177238321 | + | 1077 | AATCAAAGAATTCTCGTCCA |
| chr5 | 177238304 | 177238322 | + | 1078 | AATCAAAGAATTCTCGTCC |
| chr5 | 177238305 | 177238323 | + | 1079 | AATCAAAGAATTCTCGTC |
| chr5 | 177238306 | 177238324 | + | 1080 | AAATCAAAGAATTCTCGT |
| chr5 | 177238307 | 177238325 | + | 1081 | AAGAAATCAAAGAATTCTCG |
| chr5 | 177238308 | 177238326 | + | 1082 | AATGAAATCAAAGAATTCTC |
| chr5 | 177238309 | 177238327 | + | 1083 | AATTGAAATCAAAGAATTCT |
| chr5 | 177238310 | 177238328 | + | 1084 | AAGTTGAAATCAAAGAATTC |
| chr5 | 177238311 | 177238329 | + | 1085 | AAGGTTGAAATCAAAGAATT |
| chr5 | 177238312 | 177238330 | + | 1086 | AATGGTTGAAATCAAAGAAT |
| chr5 | 177238313 | 177238331 | + | 1087 | AATTGGTTGAAATCAAAGAA |
| chr5 | 177238314 | 177238332 | + | 1088 | AATTTGGTTGAAATCAAAGA |
| chr5 | 177238315 | 177238333 | + | 1089 | AACTTTGGTTGAAATCAAAG |
| chr5 | 177238316 | 177238334 | + | 1090 | AATCTTTGGTTGAAATCAAA |
| chr5 | 177238317 | 177238335 | + | 1091 | AATTCTTTGGTTGAAATCAA |
| chr5 | 177238318 | 177238336 | + | 1092 | AACTTCTTTGGTTGAAATCA |
| chr5 | 177238319 | 177238337 | + | 1093 | AATCTTCTTTGGTTGAAATC |
| chr5 | 177238320 | 177238338 | + | 1094 | AACTCTTCTTTGGTTGAAAT |
| chr5 | 177238321 | 177238339 | + | 1095 | AAGCTCTTCTTTGGTTGAAA |
| chr5 | 177238322 | 177238340 | + | 1096 | AAGGCTCTTCTTTGGTTGAA |
| chr5 | 177238323 | 177238341 | + | 1097 | AAGGCTCTTCTTTGGTTGA |
| chr5 | 177238324 | 177238342 | + | 1098 | AAGAGGCTCTTCTTTGGTTG |
| chr5 | 177238325 | 177238343 | + | 1099 | AAGGAGGCTCTTCTTTGGTT |
| chr5 | 177238326 | 177238344 | + | 1100 | AATGGAGGCTCTTCTTTGGT |
| chr5 | 177238327 | 177238345 | + | 1101 | AACTGGAGGCTCTTCTTTGG |
| chr5 | 177238328 | 177238346 | + | 1102 | AACTGGAGGCTCTTCTTTG |
| chr5 | 177238329 | 177238347 | + | 1103 | AACTGGAGGCTCTTCTTT |
| chr5 | 177238330 | 177238348 | + | 1104 | AAGAACTGGAGGCTCTTCTT |
| chr5 | 177238331 | 177238349 | + | 1105 | AAGAACTGGAGGCTCTTCT |
| chr5 | 177238332 | 177238350 | + | 1106 | AAGAACTGGAGGCTCTTC |
| chr5 | 177238333 | 177238351 | + | 1107 | AACAAGAACTGGAGGCTCTT |
| chr5 | 177238334 | 177238352 | + | 1108 | AATCAAGAACTGGAGGCTCT |
| chr5 | 177238335 | 177238353 | + | 1109 | AATTCAAGAACTGGAGGCTC |
| chr5 | 177238336 | 177238354 | + | 1110 | AATTTCAAGAACTGGAGGCT |
| chr5 | 177238337 | 177238355 | + | 1111 | AACTTTCAAGAACTGGAGGC |
| chr5 | 177238338 | 177238356 | + | 1112 | AACCTTTCAAGAACTGGAGG |
| chr5 | 177238339 | 177238357 | + | 1113 | AACCCTTTCAAGAACTGGAG |
| chr5 | 177238340 | 177238358 | + | 1114 | AATCCCTTTCAAGAACTGGA |
| chr5 | 177238341 | 177238359 | + | 1115 | AACTCCCTTTCAAGAACTGG |
| chr5 | 177238342 | 177238360 | + | 1116 | AACCTCCCTTTCAAGAACTG |
| chr5 | 177238343 | 177238361 | + | 1117 | AAGCCTCCCTTTCAAGAACT |
| chr5 | 177238344 | 177238362 | + | 1118 | AAGCCTCCCTTTCAAGAAC |
| chr5 | 177238345 | 177238363 | + | 1119 | AAGAGCCTCCCTTTCAAGAA |
| chr5 | 177238346 | 177238364 | + | 1120 | AAGGAGCCTCCCTTTCAAGA |
| chr5 | 177238347 | 177238365 | + | 1121 | AACGGAGCCTCCCTTTCAAG |
| chr5 | 177238348 | 177238366 | + | 1122 | AACGGAGCCTCCCTTTCAA |
| chr5 | 177238349 | 177238367 | + | 1123 | AACGGAGCCTCCCTTTCA |
| chr5 | 177238350 | 177238368 | + | 1124 | AAACGGAGCCTCCCTTTC |
| chr5 | 177238351 | 177238369 | + | 1125 | AAAACGGAGCCTCCCTTT |
| chr5 | 177238352 | 177238370 | + | 1126 | AAAAACGGAGCCTCCCTT |
| chr5 | 177238353 | 177238371 | + | 1127 | AACAAAAACGGAGCCTCCCT |
| chr5 | 177238354 | 177238372 | + | 1128 | AACCAAAAACGGAGCCTCCC |
| chr5 | 177238355 | 177238373 | + | 1129 | AATCCAAAAACGGAGCCTCC |
| chr5 | 177238356 | 177238374 | + | 1130 | AACTCCAAAAACGGAGCCTC |
| chr5 | 177238357 | 177238375 | + | 1131 | AACCTCCAAAAACGGAGCCT |
| chr5 | 177238358 | 177238376 | + | 1132 | AACCCTCCAAAAACGGAGCC |
| chr5 | 177238359 | 177238377 | + | 1133 | AAGCCCTCCAAAAACGGAGC |
| chr5 | 177238360 | 177238378 | + | 1134 | AAGGCCCTCCAAAAACGGAG |
| chr5 | 177238361 | 177238379 | + | 1135 | AAGGGCCCTCCAAAAACGGA |
| chr5 | 177238362 | 177238380 | + | 1136 | AAGGGGCCCTCCAAAAACGG |
| chr5 | 177238363 | 177238381 | + | 1137 | AAGGGGCCCTCCAAAAACG |
| chr5 | 177238364 | 177238382 | + | 1138 | AAGGGGCCCTCCAAAAAC |
| chr5 | 177238365 | 177238383 | + | 1139 | AACAAGGGGCCCTCCAAAAA |
| chr5 | 177238366 | 177238384 | + | 1140 | AACCAAGGGGCCCTCCAAAA |
| chr5 | 177238367 | 177238385 | + | 1141 | AAGCCAAGGGGCCCTCCAAA |
| chr5 | 177238368 | 177238386 | + | 1142 | AAGCCAAGGGGCCCTCCAA |
| chr5 | 177238369 | 177238387 | + | 1143 | AAGAGCCAAGGGGCCCTCCA |
| chr5 | 177238370 | 177238388 | + | 1144 | AATGAGCCAAGGGGCCCTCC |
| chr5 | 177238371 | 177238389 | + | 1145 | AACTGAGCCAAGGGGCCCTC |
| chr5 | 177238372 | 177238390 | + | 1146 | AACTGAGCCAAGGGGCCCT |
| chr5 | 177238373 | 177238391 | + | 1147 | AAGACTGAGCCAAGGGGCCC |
| chr5 | 177238374 | 177238392 | + | 1148 | AATGACTGAGCCAAGGGGCC |
| chr5 | 177238375 | 177238393 | + | 1149 | AACTGACTGAGCCAAGGGGC |
| chr5 | 177238376 | 177238394 | + | 1150 | AATCTGACTGAGCCAAGGGG |
| chr5 | 177238377 | 177238395 | + | 1151 | AATTCTGACTGAGCCAAGGG |
| chr5 | 177238378 | 177238396 | + | 1152 | AAGTTCTGACTGAGCCAAGG |
| chr5 | 177238379 | 177238397 | + | 1153 | AAGTTCTGACTGAGCCAAG |
| chr5 | 177238380 | 177238398 | + | 1154 | AAGTTCTGACTGAGCCAA |
| chr5 | 177238381 | 177238399 | + | 1155 | AACAAGTTCTGACTGAGCCA |
| chr5 | 177238382 | 177238400 | + | 1156 | AACCAAGTTCTGACTGAGCC |
| chr5 | 177238383 | 177238401 | + | 1157 | AATCCAAGTTCTGACTGAGC |
| chr5 | 177238384 | 177238402 | + | 1158 | AACTCCAAGTTCTGACTGAG |
| chr5 | 177238385 | 177238403 | + | 1159 | AACCTCCAAGTTCTGACTGA |
| chr5 | 177238386 | 177238404 | + | 1160 | AACCTCCAAGTTCTGACTG |
| chr5 | 177238387 | 177238405 | + | 1161 | AACACCTCCAAGTTCTGACT |
| chr5 | 177238388 | 177238406 | + | 1162 | AACCACCTCCAAGTTCTGAC |
| chr5 | 177238389 | 177238407 | + | 1163 | AATCCACCTCCAAGTTCTGA |
| chr5 | 177238390 | 177238408 | + | 1164 | AAGTCCACCTCCAAGTTCTG |
| chr5 | 177238391 | 177238409 | + | 1165 | AATGTCCACCTCCAAGTTCT |
| chr5 | 177238392 | 177238410 | + | 1166 | AATGTCCACCTCCAAGTTC |
| chr5 | 177238393 | 177238411 | + | 1167 | AACATGTCCACCTCCAAGTT |
| chr5 | 177238394 | 177238412 | + | 1168 | AAGCATGTCCACCTCCAAGT |
| chr5 | 177238395 | 177238413 | + | 1169 | AAGCATGTCCACCTCCAAG |
| chr5 | 177238396 | 177238414 | + | 1170 | AACAGCATGTCCACCTCCAA |
| chr5 | 177238397 | 177238415 | + | 1171 | AATCAGCATGTCCACCTCCA |
| chr5 | 177238398 | 177238416 | + | 1172 | AACTCAGCATGTCCACCTCC |
| chr5 | 177238399 | 177238417 | + | 1173 | AACTCAGCATGTCCACCTC |
| chr5 | 177238400 | 177238418 | + | 1174 | AACTCAGCATGTCCACCT |
| chr5 | 177238401 | 177238419 | + | 1175 | AACAACTCAGCATGTCCACC |
| chr5 | 177238402 | 177238420 | + | 1176 | AAGCAACTCAGCATGTCCAC |
| chr5 | 177238403 | 177238421 | + | 1177 | AAGGCAACTCAGCATGTCCA |
| chr5 | 177238404 | 177238422 | + | 1178 | AACGGCAACTCAGCATGTCC |
| chr5 | 177238405 | 177238423 | + | 1179 | AAGCGGCAACTCAGCATGTC |
| chr5 | 177238406 | 177238424 | + | 1180 | AATGCGGCAACTCAGCATGT |
| chr5 | 177238407 | 177238425 | + | 1181 | AACTGCGGCAACTCAGCATG |
| chr5 | 177238408 | 177238426 | + | 1182 | AAGCTGCGGCAACTCAGCAT |
| chr5 | 177238409 | 177238427 | + | 1183 | AAGCTGCGGCAACTCAGCA |
| chr5 | 177238410 | 177238428 | + | 1184 | AACAGCTGCGGCAACTCAGC |
| chr5 | 177238411 | 177238429 | + | 1185 | AATCAGCTGCGGCAACTCAG |
| chr5 | 177238412 | 177238430 | + | 1186 | AAGTCAGCTGCGGCAACTCA |
| chr5 | 177238413 | 177238431 | + | 1187 | AAGGTCAGCTGCGGCAACTC |
| chr5 | 177238414 | 177238432 | + | 1188 | AAGGTCAGCTGCGGCAACT |
| chr5 | 177238415 | 177238433 | + | 1189 | AAGGTCAGCTGCGGCAAC |
| chr5 | 177238416 | 177238434 | + | 1190 | AACAAGGTCAGCTGCGGCAA |
| chr5 | 177238417 | 177238435 | + | 1191 | AACAAGGTCAGCTGCGGCA |
| chr5 | 177238418 | 177238436 | + | 1192 | AAGACAAGGTCAGCTGCGGC |
| chr5 | 177238419 | 177238437 | + | 1193 | AAGACAAGGTCAGCTGCGG |
| chr5 | 177238420 | 177238438 | + | 1194 | AACAGACAAGGTCAGCTGCG |
| chr5 | 177238421 | 177238439 | + | 1195 | AACAGACAAGGTCAGCTGC |
| chr5 | 177238422 | 177238440 | + | 1196 | AACACAGACAAGGTCAGCTG |
| chr5 | 177238423 | 177238441 | + | 1197 | AAGCACAGACAAGGTCAGCT |
| chr5 | 177238424 | 177238442 | + | 1198 | AAGGCACAGACAAGGTCAGC |
| chr5 | 177238425 | 177238443 | + | 1199 | AAGGCACAGACAAGGTCAG |
| chr5 | 177238426 | 177238444 | + | 1200 | AACAGGCACAGACAAGGTCA |
| chr5 | 177238427 | 177238445 | + | 1201 | AACAGGCACAGACAAGGTC |
| chr5 | 177238428 | 177238446 | + | 1202 | AACACAGGCACAGACAAGGT |
| chr5 | 177238429 | 177238447 | + | 1203 | AACCACAGGCACAGACAAGG |
| chr5 | 177238430 | 177238448 | + | 1204 | AAGCCACAGGCACAGACAAG |
| chr5 | 177238431 | 177238449 | + | 1205 | AAGCCACAGGCACAGACAA |
| chr5 | 177238432 | 177238450 | + | 1206 | AAGAGCCACAGGCACAGACA |
| chr5 | 177238433 | 177238451 | + | 1207 | AAGGAGCCACAGGCACAGAC |
| chr5 | 177238434 | 177238452 | + | 1208 | AACGGAGCCACAGGCACAGA |
| chr5 | 177238435 | 177238453 | + | 1209 | AACCGGAGCCACAGGCACAG |
| chr5 | 177238436 | 177238454 | + | 1210 | AATCCGGAGCCACAGGCACA |
| chr5 | 177238437 | 177238455 | + | 1211 | AATTCCGGAGCCACAGGCAC |
| chr5 | 177238438 | 177238456 | + | 1212 | AACTTCCGGAGCCACAGGCA |
| chr5 | 177238439 | 177238457 | + | 1213 | AACTTCCGGAGCCACAGGC |
| chr5 | 177238440 | 177238458 | + | 1214 | AAGACTTCCGGAGCCACAGG |
| chr5 | 177238441 | 177238459 | + | 1215 | AAGACTTCCGGAGCCACAG |
| chr5 | 177238442 | 177238460 | + | 1216 | AAGAGACTTCCGGAGCCACA |
| chr5 | 177238443 | 177238461 | + | 1217 | AAGAGACTTCCGGAGCCAC |
| chr5 | 177238444 | 177238462 | + | 1218 | AAGAGAGACTTCCGGAGCCA |
| chr5 | 177238445 | 177238463 | + | 1219 | AAGGAGAGACTTCCGGAGCC |
| chr5 | 177238446 | 177238464 | + | 1220 | AATGGAGAGACTTCCGGAGC |
| chr5 | 177238447 | 177238465 | + | 1221 | AAGTGGAGAGACTTCCGGAG |
| chr5 | 177238448 | 177238466 | + | 1222 | AACGTGGAGAGACTTCCGGA |
| chr5 | 177238449 | 177238467 | + | 1223 | AACCGTGGAGAGACTTCCGG |
| chr5 | 177238450 | 177238468 | + | 1224 | AAGCCGTGGAGAGACTTCCG |
| chr5 | 177238451 | 177238469 | + | 1225 | AAGGCCGTGGAGAGACTTCC |
| chr5 | 177238452 | 177238470 | + | 1226 | AAGGCCGTGGAGAGACTTC |
| chr5 | 177238453 | 177238471 | + | 1227 | AACAGGCCGTGGAGAGACTT |
| chr5 | 177238454 | 177238472 | + | 1228 | AAGCAGGCCGTGGAGAGACT |
| chr5 | 177238455 | 177238473 | + | 1229 | AAGGCAGGCCGTGGAGAGAC |
| chr5 | 177238456 | 177238474 | + | 1230 | AAGGGCAGGCCGTGGAGAGA |
| chr5 | 177238457 | 177238475 | + | 1231 | AAGGGCAGGCCGTGGAGAG |
| chr5 | 177238458 | 177238476 | + | 1232 | AAGGGCAGGCCGTGGAGA |
| chr5 | 177238459 | 177238477 | + | 1233 | AACAAGGGCAGGCCGTGGAG |
| chr5 | 177238460 | 177238478 | + | 1234 | AATCAAGGGCAGGCCGTGGA |
| chr5 | 177238461 | 177238479 | + | 1235 | AACTCAAGGGCAGGCCGTGG |
| chr5 | 177238462 | 177238480 | + | 1236 | AACTCAAGGGCAGGCCGTG |
| chr5 | 177238463 | 177238481 | + | 1237 | AAGACTCAAGGGCAGGCCGT |
| chr5 | 177238464 | 177238482 | + | 1238 | AAGACTCAAGGGCAGGCCG |
| chr5 | 177238465 | 177238483 | + | 1239 | AACAGACTCAAGGGCAGGCC |
| chr5 | 177238466 | 177238484 | + | 1240 | AATCAGACTCAAGGGCAGGC |
| chr5 | 177238467 | 177238485 | + | 1241 | AACTCAGACTCAAGGGCAGG |
| chr5 | 177238468 | 177238486 | + | 1242 | AACCTCAGACTCAAGGGCAG |
| chr5 | 177238469 | 177238487 | + | 1243 | AATCCTCAGACTCAAGGGCA |
| chr5 | 177238470 | 177238488 | + | 1244 | AATTCCTCAGACTCAAGGGC |
| chr5 | 177238471 | 177238489 | + | 1245 | AATTCCTCAGACTCAAGGG |
| chr5 | 177238472 | 177238490 | + | 1246 | AATTCCTCAGACTCAAGG |
| chr5 | 177238473 | 177238491 | + | 1247 | AACAATTCCTCAGACTCAAG |
| chr5 | 177238474 | 177238492 | + | 1248 | AAGCAATTCCTCAGACTCAA |
| chr5 | 177238475 | 177238493 | + | 1249 | AAGCAATTCCTCAGACTCA |
| chr5 | 177238476 | 177238494 | + | 1250 | AATAGCAATTCCTCAGACTC |
| chr5 | 177238477 | 177238495 | + | 1251 | AACTAGCAATTCCTCAGACT |
| chr5 | 177238478 | 177238496 | + | 1252 | AACTAGCAATTCCTCAGAC |
| chr5 | 177238479 | 177238497 | + | 1253 | AACTAGCAATTCCTCAGA |
| chr5 | 177238480 | 177238498 | + | 1254 | AATAACTAGCAATTCCTCAG |
| chr5 | 177238481 | 177238499 | + | 1255 | AATTAACTAGCAATTCCTCA |
| chr5 | 177238482 | 177238500 | + | 1256 | AATTTAACTAGCAATTCCTC |
| chr5 | 177238483 | 177238501 | + | 1257 | AATTTTAACTAGCAATTCCT |
| chr5 | 177238484 | 177238502 | + | 1258 | AAGTTTTAACTAGCAATTCC |
| chr5 | 177238485 | 177238503 | + | 1259 | AACGTTTTAACTAGCAATTC |
| chr5 | 177238514 | 177238532 | + | 1260 | AATACTGAGACCCCAACCCC |
| chr5 | 177238515 | 177238533 | + | 1261 | AATACTGAGACCCCAACCC |
| chr5 | 177238516 | 177238534 | + | 1262 | AATACTGAGACCCCAACC |
| chr5 | 177238517 | 177238535 | + | 1263 | AAATACTGAGACCCCAAC |
| chr5 | 177238518 | 177238536 | + | 1264 | AACAAATACTGAGACCCCAA |
| chr5 | 177238519 | 177238537 | + | 1265 | AATCAAATACTGAGACCCCA |
| chr5 | 177238520 | 177238538 | + | 1266 | AACTCAAATACTGAGACCCC |
| chr5 | 177238521 | 177238539 | + | 1267 | AAGCTCAAATACTGAGACCC |
| chr5 | 177238522 | 177238540 | + | 1268 | AATGCTCAAATACTGAGACC |
| chr5 | 177238523 | 177238541 | + | 1269 | AACTGCTCAAATACTGAGAC |
| chr5 | 177238524 | 177238542 | + | 1270 | AATCTGCTCAAATACTGAGA |
| chr5 | 177238525 | 177238543 | + | 1271 | AATCTGCTCAAATACTGAG |
| chr5 | 177238526 | 177238544 | + | 1272 | AATATCTGCTCAAATACTGA |
| chr5 | 177238527 | 177238545 | + | 1273 | AATATCTGCTCAAATACTG |
| chr5 | 177238528 | 177238546 | + | 1274 | AACATATCTGCTCAAATACT |
| chr5 | 177238529 | 177238547 | + | 1275 | AATCATATCTGCTCAAATAC |
| chr5 | 177238530 | 177238548 | + | 1276 | AATCATATCTGCTCAAATA |
| chr5 | 177238531 | 177238549 | + | 1277 | AATCATATCTGCTCAAAT |
| chr5 | 177238532 | 177238550 | + | 1278 | AATAATCATATCTGCTCAAA |
| chr5 | 177238533 | 177238551 | + | 1279 | AACTAATCATATCTGCTCAA |
| chr5 | 177238534 | 177238552 | + | 1280 | AATCTAATCATATCTGCTCA |
| chr5 | 177238535 | 177238553 | + | 1281 | AACTCTAATCATATCTGCTC |
| chr5 | 177238536 | 177238554 | + | 1282 | AACCTCTAATCATATCTGCT |
| chr5 | 177238537 | 177238555 | + | 1283 | AATCCTCTAATCATATCTGC |
| chr5 | 177238538 | 177238556 | + | 1284 | AATTCCTCTAATCATATCTG |
| chr5 | 177238539 | 177238557 | + | 1285 | AACTTCCTCTAATCATATCT |
| chr5 | 177238540 | 177238558 | + | 1286 | AAGCTTCCTCTAATCATATC |
| chr5 | 177238541 | 177238559 | + | 1287 | AATGCTTCCTCTAATCATAT |
| chr5 | 177238542 | 177238560 | + | 1288 | AACTGCTTCCTCTAATCATA |
| chr5 | 177238543 | 177238561 | + | 1289 | AACCTGCTTCCTCTAATCAT |
| chr5 | 177238544 | 177238562 | + | 1290 | AATCCTGCTTCCTCTAATCA |
| chr5 | 177238545 | 177238563 | + | 1291 | AACTCCTGCTTCCTCTAATC |
| chr5 | 177238546 | 177238564 | + | 1292 | AATCTCCTGCTTCCTCTAAT |
| chr5 | 177238547 | 177238565 | + | 1293 | AATCTCCTGCTTCCTCTAA |
| chr5 | 177238548 | 177238566 | + | 1294 | AATCTCCTGCTTCCTCTA |
| chr5 | 177238549 | 177238567 | + | 1295 | AAATCTCCTGCTTCCTCT |
| chr5 | 177238550 | 177238568 | + | 1296 | AAAATCTCCTGCTTCCTC |
| chr5 | 177238551 | 177238569 | + | 1297 | AATAAAATCTCCTGCTTCCT |
| chr5 | 177238552 | 177238570 | + | 1298 | AACTAAAATCTCCTGCTTCC |
| chr5 | 177238553 | 177238571 | + | 1299 | AACTAAAATCTCCTGCTTC |
| chr5 | 177238554 | 177238572 | + | 1300 | AATACTAAAATCTCCTGCTT |
| chr5 | 177238555 | 177238573 | + | 1301 | AATACTAAAATCTCCTGCT |
| chr5 | 177238556 | 177238574 | + | 1302 | AACATACTAAAATCTCCTGC |
| chr5 | 177238557 | 177238575 | + | 1303 | AACATACTAAAATCTCCTG |
| chr5 | 177238558 | 177238576 | + | 1304 | AACATACTAAAATCTCCT |
| chr5 | 177238559 | 177238577 | + | 1305 | AAACATACTAAAATCTCC |
| chr5 | 177238560 | 177238578 | + | 1306 | AAAACATACTAAAATCTC |
| chr5 | 177238561 | 177238579 | + | 1307 | AACAAAACATACTAAAATCT |
| chr5 | 177238562 | 177238580 | + | 1308 | AATCAAAACATACTAAAATC |
| chr5 | 177238563 | 177238581 | + | 1309 | AATCAAAACATACTAAAAT |
| chr5 | 177238564 | 177238582 | + | 1310 | AACATCAAAACATACTAAAA |
| chr5 | 177238565 | 177238583 | + | 1311 | AACATCAAAACATACTAAA |
| chr5 | 177238566 | 177238584 | + | 1312 | AATACATCAAAACATACTAA |
| chr5 | 177238567 | 177238585 | + | 1313 | ATTACATCAAAACATACTA |
| chr5 | 177238568 | 177238586 | + | 1314 | ATTTACATCAAAACATACT |
| chr5 | 177238569 | 177238587 | + | 1315 | AACTTTACATCAAAACATAC |
| chr5 | 177238570 | 177238588 | + | 1316 | AAGCTTTACATCAAAACATA |
| chr5 | 177238571 | 177238589 | + | 1317 | AAGGCTTTACATCAAAACAT |
| chr5 | 177238572 | 177238590 | + | 1318 | AATGGCTTTACATCAAAACA |
| chr5 | 177238573 | 177238591 | + | 1319 | AATTGGCTTTACATCAAAAC |
| chr5 | 177238574 | 177238592 | + | 1320 | AAGTTGGCTTTACATCAAAA |
| chr5 | 177238575 | 177238593 | + | 1321 | AATGTTGGCTTTACATCAAA |
| chr5 | 177238576 | 177238594 | + | 1322 | AATGTTGGCTTTACATCAA |
| chr5 | 177238577 | 177238595 | + | 1323 | AATGTTGGCTTTACATCA |
| chr5 | 177238578 | 177238596 | + | 1324 | AACAATGTTGGCTTTACATC |
| chr5 | 177238579 | 177238597 | + | 1325 | AACAATGTTGGCTTTACAT |
| chr5 | 177238580 | 177238598 | + | 1326 | AATACAATGTTGGCTTTACA |
| chr5 | 177238581 | 177238599 | + | 1327 | AATACAATGTTGGCTTTAC |
| chr5 | 177238582 | 177238600 | + | 1328 | AAGATACAATGTTGGCTTTA |
| chr5 | 177238583 | 177238601 | + | 1329 | AAGATACAATGTTGGCTTT |
| chr5 | 177238584 | 177238602 | + | 1330 | AATAGATACAATGTTGGCTT |
| chr5 | 177238585 | 177238603 | + | 1331 | AATAGATACAATGTTGGCT |
| chr5 | 177238586 | 177238604 | + | 1332 | AATATAGATACAATGTTGGC |
| chr5 | 177238587 | 177238605 | + | 1333 | AATATAGATACAATGTTGG |
| chr5 | 177238588 | 177238606 | + | 1334 | AATATATAGATACAATGTTG |
| chr5 | 177238589 | 177238607 | + | 1335 | AAGTATATAGATACAATGTT |
| chr5 | 177238590 | 177238608 | + | 1336 | AATGTATATAGATACAATGT |
| chr5 | 177238591 | 177238609 | + | 1337 | AATTGTATATAGATACAATG |
| chr5 | 177238592 | 177238610 | + | 1338 | AATTGTATATAGATACAAT |
| chr5 | 177238593 | 177238611 | + | 1339 | AATATTGTATATAGATACAA |
| chr5 | 177238594 | 177238612 | + | 1340 | AATTATTGTATATAGATACA |
| chr5 | 177238595 | 177238613 | + | 1341 | AATTTATTGTATATAGATAC |
| chr5 | 177238596 | 177238614 | + | 1342 | AAGTTTATTGTATATAGATA |
| chr5 | 177238597 | 177238615 | + | 1343 | AAGTTTATTGTATATAGAT |
| chr5 | 177238598 | 177238616 | + | 1344 | AATAGTTTATTGTATATAGA |
| chr5 | 177238599 | 177238617 | + | 1345 | AAGTAGTTTATTGTATATAG |
| chr5 | 177238600 | 177238618 | + | 1346 | AAGGTAGTTTATTGTATATA |
| chr5 | 177238601 | 177238619 | + | 1347 | AAGGGTAGTTTATTGTATAT |
| chr5 | 177238602 | 177238620 | + | 1348 | AAGGGGTAGTTTATTGTATA |
| chr5 | 177238603 | 177238621 | + | 1349 | AAGGGGGTAGTTTATTGTAT |
| chr5 | 177238604 | 177238622 | + | 1350 | AAGGGGGTAGTTTATTGTA |
| chr5 | 177238605 | 177238623 | + | 1351 | AAGGGGGTAGTTTATTGT |
| chr5 | 177238606 | 177238624 | + | 1352 | AAAGGGGGTAGTTTATTG |
| chr5 | 177238607 | 177238625 | + | 1353 | AAAAGGGGGTAGTTTATT |
| chr5 | 177238608 | 177238626 | + | 1354 | AACAAAAGGGGGTAGTTTAT |
| chr5 | 177238609 | 177238627 | + | 1355 | AACAAAAGGGGGTAGTTTA |

TABLE 5C
Exemplary U7 Vector Sequence

| | | SEQ |
|---|---|---|
| | | ID |
| Region | Sequence | NO: |
| Promoter | cccacatcgcctgccactacttaagtccgattcacttcggctttagctccaagcctttaatctcgcgaagct | 1751 |
| sequence | ctttttttttttttaacaacataggagctgtgattggctgttttcagccaatcagcactgactcatttgcat | |
| (Mouse U7 | agcctttacaagcggtcacaaactcaagaaacgagcggttttaatagtcttttagaatattgtttatcgaac | |
| promoter) | cgaataaggaactgtgctttgtgattcacatatcagtggaggggtgtggaaatggcaccttgatctcaccct | |
| | catcgaaagtggagttgatgtccttccctggctcgctacagacgcacttccgc | |
| Wild-type U7 | AAGTGTTACAGCTCTTTTAG | 1752 |
| Antisense | | |
| sequence | | |
| Wild-type U7 | AAGTGTTACAGCTCTTTTAGAATTTGTCTAGCAGGTTTTCTGAC | 1753 |
| non-coding | TTCGGTCGGAAAACCCCT | |
| RNA sequence | | |
| ASO sequences | Any of the ASO sequence from Table 4, Table 5A, Table 5A-1, Table 5B, | |
| replacing the | Table 5B-1, Table 5G, and Table 5G-1 | |
| Wild-type U7 | | |
| Antisense | | |
| sequence | | |
| Modified U7 | AAGTGTTACAGCTCTTTTAGAATTTTTGGAGCAGGTTTTCTGAC | 1754 |
| snRNA | TTCGGTCGGAAAACCCCT | |
| (smOPT) non- | | |
| coding RNA | | |
| sequence | | |
| smOPT | AATTTTTGGAG | 1755 |
| sequence | | |
| 3′ regulatory | cccaatttcactggtctacaatgaaagcaaaacagttctcttccccgctccccggtgtgtgagaggggct | 1756 |
| sequence | ttgatccttctctggtttcctaggaaacgcgtatgtgctagagccacgctctgagacttccgcctcgtgc | |
| | ggtcccgcttcctttctgcctcctctgg | |
| Exemplary Full | cccacatcgcctgccactacttaagtccgattcacttcggctttagctccaagcctttaatctcgcgaag | 1757 |
| sequence of | ctctttttttttttttaacaacataggagctgtgattggctgttttcagccaatcagcactgactcattt | |
| wild-type U7 | gcatagcctttacaagcggtcacaaactcaagaaacgagcggttttaatagtcttttagaatattgttta | |
| snRNA | tcgaaccgaataaggaactgtgctttgtgattcacatatcagtggaggggtgtggaaatggcaccttgat | |
| | ctcaccctcatcgaaagtggagttgatgtccttccctggctcgctacagacgcacttccgcAAGTGTTAC | |
| | AGCTCTTTTAGAATTTGTCTAGCAGGTTTTCTGACTTCGGTCGGAAAACCCCTcccaattt | |
| | cactggtctacaatgaaagcaaaacagttctcttccccgctccccggtgtgtgagaggggctttgatcct | |
| | tctctggtttcctaggaaacgcgtatgtgctagagccacgctctgagacttccgcctcgtgcggtcccgc | |
| | ttcctttctgcctcctctgg | |
| Exemplary Full | cccacatcgcctgccactacttaagtccgattcacttcggctttagctccaagcctttaatctcgcgaag | 1758 |
| sequence of | ctctttttttttttttaacaacataggagctgtgattggctgttttcagccaatcagcactgactcattt | |
| modified U7 | gcatagcctttacaagcggtcacaaactcaagaaacgagcggttttaatagtcttttagaatattgttta | |
| snRNA | tcgaaccgaataaggaactgtgctttgtgattcacatatcagtggaggggtgtggaaatggcaccttgat | |
| (smOPT) | ctcaccctcatcgaaagtggagttgatgtccttccctggctcgctacagacgcacttccgcAAGTGTTAC | |
| | AGCTCTTTTAGAATTTTTGGAGCAGGTTTTCTGACTTCGGTCGGAAAACCCCTcccaattt | |
| | cactggtctacaatgaaagcaaaacagttctcttccccgctccccggtgtgtgagaggggctttgatcct | |
| | tctctggtttcctaggaaacgcgtatgtgctagagccacgctctgagacttccgcctcgtgcggtcccgc | |
| | ttcctttctgcctcctctgg | |
| Full sequence | cccacatcgcctgccactacttaagtccgattcacttcggctttagctccaagcctttaatctcgcgaag | 1751 |
| of modified U7 | ctctttttttttttttaacaacataggagctgtgattggctgttttcagccaatcagcactgactcattt | |
| snRNA | gcatagcctttacaagcggtcacaaactcaagaaacgagcggttttaatagtcttttagaatattgttta | |
| (smOPT) | tcgaaccgaataaggaactgtgctttgtgattcacatatcagtggaggggtgtggaaatggcaccttgat | |
| containing an | ctcaccctcatcgaaagtggagttgatgtccttccctggctcgctacagacgcacttccgc[ASO | 1759 |
| ASO sequence | sequence]AATTTTTGGAGCAGGTTTTCTGACTTCGGTCGGAAAACCCCTccca | |
| replacing the | atttcactggtctacaatgaaagcaaaacagttctcttccccgctccccggtgtgtgagaggggctttga | |
| antisense | tccttctctggtttcctaggaaacgcgtatgtgctagagccacgctctgagacttccgcctcgtgcggtc | |
| sequence of U7 | ccgcttcctttctgcctcctctgg | |
| snRNA | | |
| Exemplary full | cccacatcgcctgccactacttaagtccgattcactteggctttagctccaagcctttaatctcgcgaag | 1760 |
| sequence of | ctctttttttttttttaacaacataggagctgtgattggctgttttcagccaatcagcactgactcattt | |
| modified U7 | gcatagcctttacaagcggtcacaaactcaagaaacgagcggttttaatagtcttttagaatattgttta | |
| snRNA | tcgaaccgaataaggaactgtgctttgtgattcacatatcagtggaggggtgtggaaatggcaccttgat | |
| (smOPT) | ctcaccctcatcgaaagtggagttgatgtccttccctggctcgctacagacgcacttccgcAACAAAGGC | |
| containing an | TACAAAAAGTAATTTTTGGAGCAGGTTTTCTGACTTCGGTCGGAAAACCCCTcccaat | |
| ASO sequence | ttcactggtctacaatgaaagcaaaacagttctcttccccgctccccggtgtgtgagaggggctttgatc | |
| replacing the | cttctctggtttcctaggaaacgcgtatgtgctagagccacgctctgagacttccgcctcgtgcggtccc | |
| antisense | gcttcctttctgcctcctctgg | |
| sequence of U7 | | |
| snRNA | | |

TABLE 5D
Exemplary ASO Sequences

| | | | | | SEQ | |
|---|---|---|---|---|---|---|
| chr# | Start | End | Name | Strand | ID NO: | ASO Sequence |
| chr5 | 177238265 | 177238283 | NSD1: NM_001365684: | + | 1356 | GATCGACCTCGGG |
| | | | U1: Ex8: 30 | | | CTAGA |
| chr5 | 177238270 | 177238288 | NSD1: NM_001365684: | + | 1357 | CACTAGATCGACCT |
| | | | U1: Ex8: 35 | | | CGGG |
| chr5 | 177238275 | 177238293 | NSD1: NM_001365684: | + | 1358 | CTGAGCACTAGATC |
| | | | U1: Ex8: 40 | | | GACC |
| chr5 | 177238280 | 177238298 | NSD1: NM_001365684: | + | 1359 | TTGTTCTGAGCACT |
| | | | U1: Ex8: 45 | | | AGAT |
| chr5 | 177238285 | 177238303 | NSD1: NM_001365684: | + | 1360 | CCTGCTTGTTCTGA |
| | | | U1: Ex8: 50 | | | GCAC |
| chr5 | 177238290 | 177238308 | NSD1: NM_001365684: | + | 1361 | GTCCACCTGCTTGT |
| | | | U1: Ex8: 55 | | | TCTG |
| chr5 | 177238295 | 177238313 | NSD1: NM_001365684: | + | 1362 | TTCTCGTCCACCTG |
| | | | U1: Ex8: 60 | | | CTTG |
| chr5 | 177238300 | 177238318 | NSD1: NM_001365684: | + | 1363 | AAGAATTCTCGTCC |
| | | | U1: Ex8: 65 | | | ACCT |
| chr5 | 177238305 | 177238323 | NSD1: NM_001365684: | + | 1364 | AATCAAAGAATTCT |
| | | | U1: Ex8: 70 | | | CGTC |
| chr5 | 177238310 | 177238328 | NSD1: NM_001365684: | + | 1365 | GTTGAAATCAAAG |
| | | | U1: Ex8: 75 | | | AATTC |
| chr5 | 177238315 | 177238333 | NSD1: NM_001365684: | + | 1366 | CTTTGGTTGAAATC |
| | | | U1: Ex8: 80 | | | AAAG |
| chr5 | 177238320 | 177238338 | NSD1: NM_001365684: | + | 1367 | CTCTTCTTTGGTTG |
| | | | U1: Ex8: 85 | | | AAAT |
| chr5 | 177238325 | 177238343 | NSD1: NM_001365684: | + | 1368 | GGAGGCTCTTCTTT |
| | | | U1: Ex8: 90 | | | GGTT |
| chr5 | 177238330 | 177238348 | NSD1: NM_001365684: | + | 1369 | GAACTGGAGGCTC |
| | | | U1: Ex8: 95 | | | TTCTT |
| chr5 | 177238335 | 177238353 | NSD1: NM_001365684: | + | 1370 | TTCAAGAACTGGA |
| | | | U1: Ex8: 100 | | | GGCTC |
| chr5 | 177238340 | 177238358 | NSD1: NM_001365684: | + | 1371 | TCCCTTTCAAGAAC |
| | | | U1: Ex8: 105 | | | TGGA |
| chr5 | 177238345 | 177238363 | NSD1: NM_001365684: | + | 1372 | GAGCCTCCCTTTCA |
| | | | U1: Ex8: 110 | | | AGAA |
| chr5 | 177238350 | 177238368 | NSD1: NM_001365684: | + | 1373 | AAACGGAGCCTCC |
| | | | U1: Ex8: 115 | | | CTTTC |
| chr5 | 177238355 | 177238373 | NSD1: NM_001365684: | + | 1374 | TCCAAAAACGGAG |
| | | | U1: Ex8: 120 | | | CCTCC |
| chr5 | 177238360 | 177238378 | NSD1: NM_001365684: | + | 1375 | GGCCCTCCAAAAA |
| | | | U1: Ex8: 125 | | | CGGAG |
| chr5 | 177238365 | 177238383 | NSD1: NM_001365684: | + | 1376 | CAAGGGGCCCTCC |
| | | | U1: Ex8: 130 | | | AAAAA |
| chr5 | 177238370 | 177238388 | NSD1: NM_001365684: | + | 1377 | TGAGCCAAGGGGC |
| | | | U1: Ex8: 135 | | | CCTCC |
| chr5 | 177238371 | 177238389 | NSD1: NM_001365684: | + | 1378 | CTGAGCCAAGGGG |
| | | | U1: Ex8: −119 | | | CCCTC |
| chr5 | 177238376 | 177238394 | NSD1: NM_001365684: | + | 1379 | TCTGACTGAGCCAA |
| | | | U1: Ex8: −114 | | | GGGG |
| chr5 | 177238381 | 177238399 | NSD1: NM_001365684: | + | 1380 | CAAGTTCTGACTGA |
| | | | U1: Ex8: −109 | | | GCCA |
| chr5 | 177238386 | 177238404 | NSD1: NM_001365684: | + | 1381 | ACCTCCAAGTTCTG |
| | | | U1: Ex8: −104 | | | ACTG |
| chr5 | 177238391 | 177238409 | NSD1: NM_001365684: | + | 1382 | TGTCCACCTCCAAG |
| | | | U1: Ex8: −99 | | | TTCT |
| chr5 | 177238396 | 177238414 | NSD1: NM_001365684: | + | 1383 | CAGCATGTCCACCT |
| | | | U1: Ex8: −94 | | | CCAA |
| chr5 | 177238401 | 177238419 | NSD1: NM_001365684: | + | 1384 | CAACTCAGCATGTC |
| | | | U1: Ex8: −89 | | | CACC |
| chr5 | 177238406 | 177238424 | NSD1: NM_001365684: | + | 1385 | TGCGGCAACTCAG |
| | | | U1: Ex8: −84 | | | CATGT |
| chr5 | 177238411 | 177238429 | NSD1: NM_001365684: | + | 1386 | TCAGCTGCGGCAA |
| | | | U1:Ex8:− 79 | | | CTCAG |
| chr5 | 177238416 | 177238434 | NSD1: NM_001365684: | + | 1387 | CAAGGTCAGCTGC |
| | | | U1: Ex8: −74 | | | GGCAA |
| chr5 | 177238421 | 177238439 | NSD1: NM_001365684: | + | 1388 | ACAGACAAGGTCA |
| | | | U1: Ex8: −69 | | | GCTGC |
| chr5 | 177238426 | 177238444 | NSD1: NM_001365684: | + | 1389 | CAGGCACAGACAA |
| | | | U1: Ex8: −64 | | | GGTCA |
| chr5 | 177238431 | 177238449 | NSD1: NM_001365684: | + | 1390 | AGCCACAGGCACA |
| | | | U1: Ex8: −59 | | | GACAA |
| chr5 | 177238436 | 177238454 | NSD1:NM_001365684: | + | 1391 | TCCGGAGCCACAG |
| | | | U1: Ex8: −54 | | | GCACA |
| chr5 | 177238441 | 177238459 | NSD1:NM_001365684: | + | 1392 | AGACTTCCGGAGC |
| | | | U1: Ex8: −49 | | | CACAG |
| chr5 | 177238446 | 177238464 | NSD1:NM_001365684: | + | 1393 | TGGAGAGACTTCC |
| | | | U1: Ex8: −44 | | | GGAGC |
| chr5 | 177238451 | 177238469 | NSD1:NM_001365684: | + | 1394 | GGCCGTGGAGAGA |
| | | | U1: Ex8: −39 | | | CTTCC |
| chr5 | 177238456 | 177238474 | NSD1:NM_001365684: | + | 1395 | GGGCAGGCCGTGG |
| | | | U1: Ex8: −34 | | | AGAGA |
| chr5 | 177238461 | 177238479 | NSD1: NM_001365684: | + | 1396 | CTCAAGGGCAGGC |
| | | | U1: Ex8:− 29 | | | CGTGG |
| chr5 | 177238466 | 177238484 | NSD1: NM_001365684: | + | 1397 | TCAGACTCAAGGG |
| | | | U1: Ex8:− 24 | | | CAGGC |
| chr5 | 177238471 | 177238489 | NSD1: NM_001365684: | + | 1398 | ATTCCTCAGACTCA |
| | | | U1: Ex8:− 19 | | | AGGG |
| chr5 | 177238476 | 177238494 | NSD1: NM_001365684: | + | 1399 | TAGCAATTCCTCAG |
| | | | U1: Ex8:− 14 | | | ACTC |
| chr5 | 177238481 | 177238499 | NSD1: NM_001365684: | + | 1400 | TTAACTAGCAATTC |
| | | | U1: Ex8:− 9 | | | CTCA |
| chr5 | 177238486 | 177238504 | NSD1: NM_001365684: | + | 1401 | GCGTTTTAACTAGC |
| | | | U1: Ex8:− 4 | | | AATT |
| chr5 | 177238504 | 177238522 | NSD1: NM_001365684: | + | 1402 | CCAACCCCACCTTA |
| | | | U1: Ex8−IVS8: − 3 | | | CCTG |
| chr5 | 177238509 | 177238527 | NSD1: NM_001365684: | + | 1403 | AGACCCCAACCCC |
| | | | U1: IVS8: 3 | | | ACCTT |
| chr5 | 177238514 | 177238532 | NSD1: NM_001365684: | + | 1404 | TACTGAGACCCCA |
| | | | U1: IVS8: 8 | | | ACCCC |
| chr5 | 177238519 | 177238537 | NSD1: NM_001365684: | + | 1405 | TCAAATACTGAGA |
| | | | U1: IVS8: 13 | | | CCCCA |
| chr5 | 177238524 | 177238542 | NSD1: NM_001365684: | + | 1406 | TCTGCTCAAATACT |
| | | | U1: IVS8: 18 | | | GAGA |
| chr5 | 177238529 | 177238547 | NSD1: NM_001365684: | + | 1407 | TCATATCTGCTCAA |
| | | | U1: IVS8: 23 | | | ATAC |
| chr5 | 177238534 | 177238552 | NSD1: NM_001365684: | + | 1408 | TCTAATCATATCTG |
| | | | U1: IVS8: 28 | | | CTCA |
| chr5 | 177238539 | 177238557 | NSD1:NM_001365684: | + | 1409 | CTTCCTCTAATCAT |
| | | | U1: IVS8: 33 | | | ATCT |
| chr5 | 177238544 | 177238562 | NSD1:NM_001365684: | + | 1410 | TCCTGCTTCCTCTA |
| | | | U1: IVS8: 38 | | | ATCA |
| chr5 | 177238549 | 177238567 | NSD1:NM_001365684: | + | 1411 | AAATCTCCTGCTTC |
| | | | U1: IVS8: 43 | | | CTCT |
| chr5 | 177238554 | 177238572 | NSD1:NM_001365684: | + | 1412 | TACTAAAATCTCCT |
| | | | U1: IVS8: 48 | | | GCTT |
| chr5 | 177238559 | 177238577 | NSD1:NM_001365684: | + | 1413 | AAACATACTAAAA |
| | | | U1: IVS8: 53 | | | TCTCC |
| chr5 | 177238564 | 177238582 | NSD1:NM_001365684: | + | 1414 | CATCAAAACATACT |
| | | | U1: IVS8: 58 | | | AAAA |
| chr5 | 177238569 | 177238587 | NSD1:NM_001365684: | + | 1415 | CTTTACATCAAAAC |
| | | | U1: IVS8: 63 | | | ATAC |
| chr5 | 177238574 | 177238592 | NSD1:NM_001365684: | + | 1416 | GTTGGCTTTACATC |
| | | | U1: IVS8: 68 | | | AAAA |
| chr5 | 177238579 | 177238597 | NSD1:NM_001365684: | + | 1417 | ACAATGTTGGCTTT |
| | | | U1: IVS8: 73 | | | ACAT |
| chr5 | 177238584 | 177238602 | NSD1:NM_001365684: | + | 1418 | TAGATACAATGTTG |
| | | | U1: IVS8: 78 | | | GCTT |
| chr5 | 177238589 | 177238607 | NSD1: NM_001365684: | + | 1419 | GTATATAGATACA |
| | | | U1: IVS8: 83 | | | ATGTT |
| chr5 | 177238594 | 177238612 | NSD1: NM_001365684: | + | 1420 | TTATTGTATATAGA |
| | | | U1: IVS8: 88 | | | TACA |
| chr5 | 177238599 | 177238617 | NSD1: NM_001365684: | + | 1421 | GTAGTTTATTGTAT |
| | | | U1: IVS8: 93 | | | ATAG |
| chr5 | 177238604 | 177238622 | NSD1: NM_001365684: | + | 1422 | AGGGGGTAGTTTAT |
| | | | U1: IVS8: 98 | | | TGTA |
| chr5 | 177238606 | 177238624 | NSD1: NM_001365684: | + | 1423 | AAAGGGGGTAGTT |
| | | | U1: IVS8: 100 | | | TATTG |

TABLE 5E
Exemplary ASO Sequences

| | | | | | SEQ | |
|---|---|---|---|---|---|---|
| | | | | | ID | |
| chr | Start | End | Name | Strand | NO: | ASO sequence |
| chr5 | 177238265 | 177238283 | NSD1:NM_001365684: | + | 1424 | GATCGACCTCGGGC |
| | | | U1:Ex8:30 | | | TAGA |
| chr5 | 17723 | 1772382 | NSD1:NM_001365684: | + | 1425 | AGATCGACCTCGGG |
| | 8266 | 84 | U1:Ex8:31 | | | CTAG |
| chr5 | 17723 | 1772382 | NSD1:NM_001365684: | + | 1426 | TAGATCGACCTCGG |
| | 8267 | 85 | U1:Ex8:32 | | | GCTA |
| chr5 | 17723 | 1772382 | NSD1:NM_001365684: | + | 1427 | CTAGATCGACCTCG |
| | 8268 | 86 | U1:Ex8:33 | | | GGCT |
| chr5 | 17723 | 1772382 | NSD1:NM_001365684: | + | 1428 | ACTAGATCGACCTC |
| | 8269 | 87 | U1:Ex8:34 | | | GGGC |
| chr5 | 17723 | 1772382 | NSD1:NM_001365684: | + | 1429 | CACTAGATCGACCTC |
| | 8270 | 88 | U1:Ex8:35 | | | GGG |
| chr5 | 17723 | 1772382 | NSD1:NM_001365684: | + | 1430 | GCACTAGATCGACC |
| | 8271 | 89 | U1:Ex8:36 | | | TCGG |
| chr5 | 17723 | 1772382 | NSD1:NM_001365684: | + | 1431 | AGCACTAGATCGAC |
| | 8272 | 90 | U1:Ex8:37 | | | CTCG |
| chr5 | 17723 | 1772382 | NSD1:NM_001365684: | + | 1432 | GAGCACTAGATCGA |
| | 8273 | 91 | U1:Ex8:38 | | | CCTC |
| chr5 | 17723 | 1772382 | NSD1:NM_001365684: | + | 1433 | TGAGCACTAGATCG |
| | 8274 | 92 | U1:Ex8:39 | | | ACCT |
| chr5 | 17723 | 1772382 | NSD1:NM_001365684: | + | 1434 | CTGAGCACTAGATC |
| | 8275 | 93 | U1:Ex8:40 | | | GACC |
| chr5 | 17723 | 1772382 | NSD1:NM_001365684: | + | 1435 | TCTGAGCACTAGATC |
| | 8276 | 94 | U1:Ex8:41 | | | GAC |
| chr5 | 17723 | 1772382 | NSD1:NM_001365684: | + | 1436 | TTCTGAGCACTAGAT |
| | 8277 | 95 | U1:Ex8:42 | | | CGA |
| chr5 | 17723 | 1772382 | NSD1:NM_001365684: | + | 1437 | GTTCTGAGCACTAG |
| | 8278 | 96 | U1:Ex8:43 | | | ATCG |
| chr5 | 17723 | 1772382 | NSD1:NM_001365684: | + | 1438 | TGTTCTGAGCACTAG |
| | 8279 | 97 | U1:Ex8:44 | | | ATC |
| chr5 | 17723 | 1772382 | NSD1:NM_001365684: | + | 1439 | TTGTTCTGAGCACTA |
| | 8280 | 98 | U1:Ex8:45 | | | GAT |
| chr5 | 17723 | 1772382 | NSD1:NM_001365684: | + | 1440 | CTTGTTCTGAGCACT |
| | 8281 | 99 | U1:Ex8:46 | | | AGA |
| chr5 | 17723 | 1772383 | NSD1:NM_001365684: | + | 1441 | GCTTGTTCTGAGCAC |
| | 8282 | 00 | U1:Ex8:47 | | | TAG |
| chr5 | 17723 | 1772383 | NSD1:NM_001365684: | + | 1442 | TGCTTGTTCTGAGCA |
| | 8283 | 01 | U1:Ex8:48 | | | CTA |
| chr5 | 17723 | 1772383 | NSD1:NM_001365684: | + | 1443 | CTGCTTGTTCTGAGC |
| | 8284 | 02 | U1:Ex8:49 | | | ACT |
| chr5 | 17723 | 1772383 | NSD1:NM_001365684: | + | 1444 | CCTGCTTGTTCTGAG |
| | 8285 | 03 | U1:Ex8:50 | | | CAC |
| chr5 | 17723 | 1772383 | NSD1:NM_001365684: | + | 1445 | ACCTGCTTGTTCTGA |
| | 8286 | 04 | U1:Ex8:51 | | | GCA |
| chr5 | 17723 | 1772383 | NSD1:NM_001365684: | + | 1446 | CACCTGCTTGTTCTG |
| | 8287 | 05 | U1:Ex8:52 | | | AGC |
| chr5 | 17723 | 1772383 | NSD1:NM_001365684: | + | 1447 | CCACCTGCTTGTTCT |
| | 8288 | 06 | U1:Ex8:53 | | | GAG |
| chr5 | 17723 | 1772383 | NSD1:NM_001365684: | + | 1448 | TCCACCTGCTTGTTC |
| | 8289 | 07 | U1:Ex8:54 | | | TGA |
| chr5 | 17723 | 1772383 | NSD1:NM_001365684: | + | 1449 | GTCCACCTGCTTGTT |
| | 8290 | 08 | U1:Ex8:55 | | | CTG |
| chr5 | 17723 | 1772383 | NSD1:NM_001365684: | + | 1450 | CGTCCACCTGCTTGT |
| | 8291 | 09 | U1:Ex8:56 | | | TCT |
| chr5 | 17723 | 1772383 | NSD1:NM_001365684: | + | 1451 | TCGTCCACCTGCTTG |
| | 8292 | 10 | U1:Ex8:57 | | | TTC |
| chr5 | 17723 | 1772383 | NSD1:NM_001365684: | + | 1452 | CTCGTCCACCTGCTT |
| | 8293 | 11 | U1:Ex8:58 | | | GTT |
| chr5 | 17723 | 1772383 | NSD1:NM_001365684: | 1 | 1453 | TCTCGTCCACCTGCT |
| | 8294 | 12 | U1:Ex8:59 | | | TGT |
| chr5 | 17723 | 1772383 | NSD1:NM_001365684: | + | 1454 | TTCTCGTCCACCTGC |
| | 8295 | 13 | U1:Ex8:60 | | | TTG |
| chr5 | 17723 | 1772383 | NSD1:NM_001365684: | + | 1455 | ATTCTCGTCCACCTG |
| | 8296 | 14 | U1:Ex8:61 | | | CTT |
| chr5 | 17723 | 1772383 | NSD1:NM_001365684: | + | 1456 | AATTCTCGTCCACCT |
| | 8297 | 15 | U1:Ex8:62 | | | GCT |
| chr5 | 17723 | 1772383 | NSD1:NM_001365684: | + | 1457 | GAATTCTCGTCCACC |
| | 8298 | 16 | U1:Ex8:63 | | | TGC |
| chr5 | 17723 | 1772383 | NSD1:NM_001365684: | + | 1458 | AGAATTCTCGTCCAC |
| | 8299 | 17 | U1:Ex8:64 | | | CTG |
| chr5 | 17723 | 1772383 | NSD1:NM_001365684: | + | 1459 | AAGAATTCTCGTCCA |
| | 8300 | 18 | U1:Ex8:65 | | | CCT |
| chr5 | 17723 | 1772383 | NSD1:NM_001365684: | + | 1460 | AAAGAATTCTCGTCC |
| | 8301 | 19 | U1:Ex8:66 | | | ACC |
| chr5 | 17723 | 1772383 | NSD1:NM_001365684: | + | 1461 | CAAAGAATTCTCGTC |
| | 8302 | 20 | U1:Ex8:67 | | | CAC |
| chr5 | 17723 | 1772383 | NSD1:NM_001365684: | + | 1462 | TCAAAGAATTCTCGT |
| | 8303 | 21 | U1:Ex8:68 | | | CCA |
| chr5 | 17723 | 1772383 | NSD1:NM_001365684: | + | 1463 | ATCAAAGAATTCTC |
| | 8304 | 22 | U1:Ex8:69 | | | GTCC |
| chr5 | 17723 | 1772383 | NSD1:NM_001365684: | + | 1464 | AATCAAAGAATTCT |
| | 8305 | 23 | U1:Ex8:70 | | | CGTC |
| chr5 | 17723 | 1772383 | NSD1:NM_001365684: | + | 1465 | AAATCAAAGAATTC |
| | 8306 | 24 | U1:Ex8:71 | | | TCGT |
| chr5 | 17723 | 1772383 | NSD1:NM_001365684: | + | 1466 | GAAATCAAAGAATT |
| | 8307 | 25 | U1:Ex8:72 | | | CTCG |
| chr5 | 17723 | 1772383 | NSD1:NM_001365684: | + | 1467 | TGAAATCAAAGAAT |
| | 8308 | 26 | U1:Ex8:73 | | | TCTC |
| chr5 | 17723 | 1772383 | NSD1:NM_001365684: | + | 1468 | TTGAAATCAAAGAA |
| | 8309 | 27 | U1:Ex8:74 | | | TTCT |
| chr5 | 17723 | 1772383 | NSD1:NM_001365684: | + | 1469 | GTTGAAATCAAAGA |
| | 8310 | 28 | U1:Ex8:75 | | | ATTC |
| chr5 | 17723 | 1772383 | NSD1:NM_001365684: | + | 1470 | GGTTGAAATCAAAG |
| | 8311 | 29 | U1:Ex8:76 | | | AATT |
| chr5 | 17723 | 1772383 | NSD1:NM_001365684: | + | 1471 | TGGTTGAAATCAAA |
| | 8312 | 30 | U1:Ex8:77 | | | GAAT |
| chr5 | 17723 | 1772383 | NSD1:NM_001365684: | + | 1472 | TTGGTTGAAATCAA |
| | 8313 | 31 | U1:Ex8:78 | | | AGAA |
| chr5 | 17723 | 1772383 | NSD1:NM_001365684: | + | 1473 | TTTGGTTGAAATCAA |
| | 8314 | 32 | U1:Ex8:79 | | | AGA |
| chr5 | 17723 | 1772383 | NSD1:NM_001365684: | + | 1474 | CTTTGGTTGAAATCA |
| | 8315 | 33 | U1:Ex8:80 | | | AAG |
| chr5 | 17723 | 1772383 | NSD1:NM_001365684: | + | 1475 | TCTTTGGTTGAAATC |
| | 8316 | 34 | U1:Ex8:81 | | | AAA |
| chr5 | 17723 | 1772383 | NSD1:NM_001365684: | + | 1476 | TTCTTTGGTTGAAAT |
| | 8317 | 35 | U1:Ex8:82 | | | CAA |
| chr5 | 17723 | 1772383 | NSD1:NM_001365684: | + | 1477 | CTTCTTTGGTTGAAA |
| | 8318 | 36 | U1:Ex8:83 | | | TCA |
| chr5 | 17723 | 1772383 | NSD1:NM_001365684: | + | 1478 | TCTTCTTTGGTTGAA |
| | 8319 | 37 | U1:Ex8:84 | | | ATC |
| chr5 | 17723 | 1772383 | NSD1:NM_001365684: | + | 1479 | CTCTTCTTTGGTTGA |
| | 8320 | 38 | U1:Ex8:85 | | | AAT |
| chr5 | 17723 | 1772383 | NSD1:NM_001365684: | + | 1480 | GCTCTTCTTTGGTTG |
| | 8321 | 39 | U1:Ex8:86 | | | AAA |
| chr5 | 17723 | 1772383 | NSD1:NM_001365684: | + | 1481 | GGCTCTTCTTTGGTT |
| | 8322 | 40 | U1:Ex8:87 | | | GAA |
| chr5 | 17723 | 1772383 | NSD1:NM_001365684: | + | 1482 | AGGCTCTTCTTTGGT |
| | 8323 | 41 | U1:Ex8:88 | | | TGA |
| chr5 | 17723 | 1772383 | NSD1:NM_001365684: | + | 1483 | GAGGCTCTTCTTTGG |
| | 8324 | 42 | U1:Ex8:89 | | | TTG |
| chr5 | 17723 | 1772383 | NSD1:NM_001365684: | + | 1484 | GGAGGCTCTTCTTTG |
| | 8325 | 43 | U1:Ex8:90 | | | GTT |
| chr5 | 17723 | 1772383 | NSD1:NM_001365684: | + | 1485 | TGGAGGCTCTTCTTT |
| | 8326 | 44 | U1:Ex8:91 | | | GGT |
| chr5 | 17723 | 1772383 | NSD1:NM_001365684: | + | 1486 | CTGGAGGCTCTTCTT |
| | 8327 | 45 | U1:Ex8:92 | | | TGG |
| chr5 | 17723 | 1772383 | NSD1:NM_001365684: | + | 1487 | ACTGGAGGCTCTTCT |
| | 8328 | 46 | U1:Ex8:93 | | | TTG |
| chr5 | 17723 | 1772383 | NSD1:NM_001365684: | + | 1488 | AACTGGAGGCTCTTC |
| | 8329 | 47 | U1:Ex8:94 | | | TTT |
| chr5 | 17723 | 1772383 | NSD1:NM_001365684: | 1 | 1489 | GAACTGGAGGCTCT |
| | 8330 | 48 | U1:Ex8:95 | | | TCTT |
| chr5 | 17723 | 1772383 | NSD1:NM_001365684: | + | 1490 | AGAACTGGAGGCTC |
| | 8331 | 49 | U1:Ex8:96 | | | TTCT |
| chr5 | 17723 | 1772383 | NSD1:NM_001365684: | + | 1491 | AAGAACTGGAGGCT |
| | 8332 | 50 | U1:Ex8:97 | | | CTTC |
| chr5 | 17723 | 1772383 | NSD1:NM_001365684: | + | 1492 | CAAGAACTGGAGGC |
| | 8333 | 51 | U1:Ex8:98 | | | TCTT |
| chr5 | 17723 | 1772383 | NSD1:NM_001365684: | + | 1493 | TCAAGAACTGGAGG |
| | 8334 | 52 | U1:Ex8:99 | | | CTCT |
| chr5 | 17723 | 1772383 | NSD1:NM_001365684: | + | 1494 | TTCAAGAACTGGAG |
| | 8335 | 53 | U1:Ex8:100 | | | GCTC |
| chr5 | 17723 | 1772383 | NSD1:NM_001365684: | + | 1495 | TTTCAAGAACTGGA |
| | 8336 | 54 | U1:Ex8:101 | | | GGCT |
| chr5 | 17723 | 1772383 | NSD1:NM_001365684: | + | 1496 | CTTTCAAGAACTGG |
| | 8337 | 55 | U1:Ex8:102 | | | AGGC |
| chr5 | 17723 | 1772383 | NSD1:NM_001365684: | + | 1497 | CCTTTCAAGAACTGG |
| | 8338 | 56 | U1:Ex8:103 | | | AGG |
| chr5 | 17723 | 1772383 | NSD1:NM_001365684: | + | 1498 | CCCTTTCAAGAACTG |
| | 8339 | 57 | U1:Ex8:104 | | | GAG |
| chr5 | 17723 | 1772383 | NSD1:NM_001365684: | + | 1499 | TCCCTTTCAAGAACT |
| | 8340 | 58 | U1:Ex8:105 | | | GGA |
| chr5 | 17723 | 1772383 | NSD1:NM_001365684: | + | 1500 | CTCCCTTTCAAGAAC |
| | 8341 | 59 | U1:Ex8:106 | | | TGG |
| chr5 | 17723 | 1772383 | NSD1:NM_001365684: | + | 1501 | CCTCCCTTTCAAGAA |
| | 8342 | 60 | U1:Ex8:107 | | | CTG |
| chr5 | 17723 | 1772383 | NSD1:NM_001365684: | + | 1502 | GCCTCCCTTTCAAGA |
| | 8343 | 61 | U1:Ex8:108 | | | ACT |
| chr5 | 17723 | 1772383 | NSD1:NM_001365684: | + | 1503 | AGCCTCCCTTTCAAG |
| | 8344 | 62 | U1:Ex8:109 | | | AAC |
| chr5 | 17723 | 1772383 | NSD1:NM_001365684: | + | 1504 | GAGCCTCCCTTTCAA |
| | 8345 | 63 | U1:Ex8:110 | | | GAA |
| chr5 | 17723 | 1772383 | NSD1:NM_001365684: | + | 1505 | GGAGCCTCCCTTTCA |
| | 8346 | 64 | U1:Ex8:111 | | | AGA |
| chr5 | 17723 | 1772383 | NSD1:NM_001365684: | + | 1506 | CGGAGCCTCCCTTTC |
| | 8347 | 65 | U1:Ex8:112 | | | AAG |
| chr5 | 17723 | 1772383 | NSD1:NM_001365684: | + | 1507 | ACGGAGCCTCCCTTT |
| | 8348 | 66 | U1:Ex8:113 | | | CAA |
| chr5 | 17723 | 1772383 | NSD1:NM_001365684: | + | 1508 | AACGGAGCCTCCCTT |
| | 8349 | 67 | U1:Ex8:114 | | | TCA |
| chr5 | 17723 | 1772383 | NSD1:NM_001365684: | + | 1509 | AAACGGAGCCTCCC |
| | 8350 | 68 | U1:Ex8:115 | | | TTTC |
| chr5 | 17723 | 1772383 | NSD1:NM_001365684: | + | 1510 | AAAACGGAGCCTCC |
| | 8351 | 69 | U1:Ex8:116 | | | CTTT |
| chr5 | 17723 | 1772383 | NSD1:NM_001365684: | + | 1511 | AAAAACGGAGCCTC |
| | 8352 | 70 | U1:Ex8:117 | | | CCTT |
| chr5 | 17723 | 1772383 | NSD1:NM_001365684: | + | 1512 | CAAAAACGGAGCCT |
| | 8353 | 71 | U1:Ex8:118 | | | CCCT |
| chr5 | 17723 | 1772383 | NSD1:NM_001365684: | + | 1513 | CCAAAAACGGAGCC |
| | 8354 | 72 | U1:Ex8:119 | | | TCCC |
| chr5 | 17723 | 1772383 | NSD1:NM_001365684: | + | 1514 | TCCAAAAACGGAGC |
| | 8355 | 73 | U1:Ex8:120 | | | CTCC |
| chr5 | 17723 | 1772383 | NSD1:NM_001365684: | + | 1515 | CTCCAAAAACGGAG |
| | 8356 | 74 | U1:Ex8:121 | | | CCTC |
| chr5 | 17723 | 1772383 | NSD1:NM_001365684:U | + | 1516 | CCTCCAAAAACGGA |
| | 8357 | 75 | U1:Ex8:122 | | | GCCT |
| chr5 | 17723 | 1772383 | NSD1:NM_001365684: | + | 1517 | CCCTCCAAAAACGG |
| | 8358 | 76 | U1:Ex8:123 | | | AGCC |
| chr5 | 17723 | 1772383 | NSD1:NM_001365684: | + | 1518 | GCCCTCCAAAAACG |
| | 8359 | 77 | U1:Ex8:124 | | | GAGC |
| chr5 | 17723 | 1772383 | NSD1:NM_001365684: | + | 1519 | GGCCCTCCAAAAAC |
| | 8360 | 78 | U1:Ex8:125 | | | GGAG |
| chr5 | 17723 | 1772383 | NSD1:NM_001365684: | + | 1520 | GGGCCCTCCAAAAA |
| | 8361 | 79 | U1:Ex8:126 | | | CGGA |
| chr5 | 17723 | 1772383 | NSD1:NM_001365684: | + | 1521 | GGGGCCCTCCAAAA |
| | 8362 | 80 | U1:Ex8:127 | | | ACGG |
| chr5 | 17723 | 1772383 | NSD1:NM_001365684: | + | 1522 | AGGGGCCCTCCAAA |
| | 8363 | 81 | U1:Ex8:128 | | | AACG |
| chr5 | 17723 | 1772383 | NSD1:NM_001365684: | + | 1523 | AAGGGGCCCTCCAA |
| | 8364 | 82 | U1:Ex8:129 | | | AAAC |
| chr5 | 17723 | 1772383 | NSD1:NM_001365684: | + | 1524 | CAAGGGGCCCTCCA |
| | 8365 | 83 | U1:Ex8:130 | | | AAAA |
| chr5 | 17723 | 1772383 | NSD1:NM_001365684: | + | 1525 | CCAAGGGGCCCTCC |
| | 8366 | 84 | U1:Ex8:131 | | | AAAA |
| chr5 | 17723 | 1772383 | NSD1:NM_001365684: | + | 1526 | GCCAAGGGGCCCTC |
| | 8367 | 85 | U1:Ex8:132 | | | CAAA |
| chr5 | 17723 | 1772383 | NSD1:NM_001365684: | + | 1527 | AGCCAAGGGGCCCT |
| | 8368 | 86 | U1:Ex8:133 | | | CCAA |
| chr5 | 17723 | 1772383 | NSD1:NM_001365684: | + | 1528 | GAGCCAAGGGGCCC |
| | 8369 | 87 | U1:Ex8:134 | | | TCCA |
| chr5 | 17723 | 1772383 | NSD1:NM_001365684: | + | 1529 | TGAGCCAAGGGGCC |
| | 8370 | 88 | U1:Ex8:135 | | | CTCC |
| chr5 | 17723 | 1772383 | NSD1:NM_001365684: | + | 1530 | CTGAGCCAAGGGGC |
| | 8371 | 89 | U1:Ex8:−119 | | | CCTC |
| chr5 | 17723 | 1772383 | NSD1:NM_001365684: | + | 1531 | ACTGAGCCAAGGGG |
| | 8372 | 90 | U1:Ex8:−118 | | | CCCT |
| chr5 | 17723 | 1772383 | NSD1:NM_001365684: | + | 1532 | GACTGAGCCAAGGG |
| | 8373 | 91 | U1:Ex8:−117 | | | GCCC |
| chr5 | 17723 | 1772383 | NSD1:NM_001365684: | + | 1533 | TGACTGAGCCAAGG |
| | 8374 | 92 | U1:Ex8:−116 | | | GGCC |
| chr5 | 17723 | 1772383 | NSD1:NM_001365684: | + | 1534 | CTGACTGAGCCAAG |
| | 8375 | 93 | U1:Ex8:−115 | | | GGGC |
| chr5 | 17723 | 1772383 | NSD1:NM_001365684: | + | 1535 | TCTGACTGAGCCAA |
| | 8376 | 94 | U1:Ex8:−114 | | | GGGG |
| chr5 | 17723 | 1772383 | NSD1:NM_001365684: | + | 1536 | TTCTGACTGAGCCAA |
| | 8377 | 95 | U1:Ex8:−113 | | | GGG |
| chr5 | 17723 | 1772383 | NSD1:NM_001365684: | + | 1537 | GTTCTGACTGAGCCA |
| | 8378 | 96 | U1:Ex8:−112 | | | AGG |
| chr5 | 17723 | 1772383 | NSD1:NM_001365684: | + | 1538 | AGTTCTGACTGAGCC |
| | 8379 | 97 | U1:Ex8:−111 | | | AAG |
| chr5 | 17723 | 1772383 | NSD1:NM_001365684: | + | 1539 | AAGTTCTGACTGAG |
| | 8380 | 98 | U1:Ex8:−110 | | | CCAA |
| chr5 | 17723 | 1772383 | NSD1:NM_001365684: | + | 1540 | CAAGTTCTGACTGA |
| | 8381 | 99 | U1:Ex8:−109 | | | GCCA |
| chr5 | 17723 | 1772384 | NSD1:NM_001365684: | + | 1541 | CCAAGTTCTGACTGA |
| | 8382 | 00 | U1:Ex8:−108 | | | GCC |
| chr5 | 17723 | 1772384 | NSD1:NM_001365684: | + | 1542 | TCCAAGTTCTGACTG |
| | 8383 | 01 | U1:Ex8:−107 | | | AGC |
| chr5 | 17723 | 1772384 | NSD1:NM_001365684: | + | 1543 | CTCCAAGTTCTGACT |
| | 8384 | 02 | U1:Ex8:−106 | | | GAG |
| chr5 | 17723 | 1772384 | NSD1:NM_001365684: | + | 1544 | CCTCCAAGTTCTGAC |
| | 8385 | 03 | U1:Ex8:−105 | | | TGA |
| chr5 | 17723 | 1772384 | NSD1:NM_001365684: | + | 1545 | ACCTCCAAGTTCTGA |
| | 8386 | 04 | U1:Ex8:−104 | | | CTG |
| chr5 | 17723 | 1772384 | NSD1:NM_001365684: | + | 1546 | CACCTCCAAGTTCTG |
| | 8387 | 05 | U1:Ex8:−103 | | | ACT |
| chr5 | 17723 | 1772384 | NSD1:NM_001365684: | + | 1547 | CCACCTCCAAGTTCT |
| | 8388 | 06 | U1:Ex8:−102 | | | GAC |
| chr5 | 17723 | 1772384 | NSD1:NM_001365684: | + | 1548 | TCCACCTCCAAGTTC |
| | 8389 | 07 | U1:Ex8:−101 | | | TGA |
| chr5 | 17723 | 1772384 | NSD1:NM_001365684: | + | 1549 | GTCCACCTCCAAGTT |
| | 8390 | 08 | U1:Ex8:−100 | | | CTG |
| chr5 | 17723 | 1772384 | NSD1:NM_001365684: | + | 1550 | TGTCCACCTCCAAGT |
| | 8391 | 09 | U1:Ex8:−99 | | | TCT |
| chr5 | 17723 | 1772384 | NSD1:NM_001365684: | + | 1551 | ATGTCCACCTCCAAG |
| | 8392 | 10 | U1:Ex8:−98 | | | TTC |
| chr5 | 17723 | 1772384 | NSD1:NM_001365684: | + | 1552 | CATGTCCACCTCCAA |
| | 8393 | 11 | U1:Ex8:−97 | | | GTT |
| chr5 | 17723 | 1772384 | NSD1:NM_001365684: | + | 1553 | GCATGTCCACCTCCA |
| | 8394 | 12 | U1:Ex8:−96 | | | AGT |
| chr5 | 17723 | 1772384 | NSD1:NM_001365684: | + | 1554 | AGCATGTCCACCTCC |
| | 8395 | 13 | U1:Ex8:−95 | | | AAG |
| chr5 | 17723 | 1772384 | NSD1:NM_001365684: | + | 1555 | CAGCATGTCCACCTC |
| | 8396 | 14 | U1:Ex8:−94 | | | CAA |
| chr5 | 17723 | 1772384 | NSD1:NM_001365684: | + | 1556 | TCAGCATGTCCACCT |
| | 8397 | 15 | U1:Ex8:−93 | | | CCA |
| chr5 | 17723 | 1772384 | NSD1:NM_001365684: | + | 1557 | CTCAGCATGTCCACC |
| | 8398 | 16 | U1:Ex8:−92 | | | TCC |
| chr5 | 17723 | 1772384 | NSD1:NM_001365684: | + | 1558 | ACTCAGCATGTCCAC |
| | 8399 | 17 | U1:Ex8:−91 | | | CTC |
| chr5 | 17723 | 1772384 | NSD1:NM_001365684: | + | 1559 | AACTCAGCATGTCC |
| | 8400 | 18 | U1:Ex8:−90 | | | ACCT |
| chr5 | 17723 | 1772384 | NSD1:NM_001365684: | + | 1560 | CAACTCAGCATGTCC |
| | 8401 | 19 | U1:Ex8:−89 | | | ACC |
| chr5 | 17723 | 1772384 | NSD1:NM_001365684: | + | 1561 | GCAACTCAGCATGT |
| | 8402 | 20 | U1:Ex8:−88 | | | CCAC |
| chr5 | 17723 | 1772384 | NSD1:NM_001365684: | + | 1562 | GGCAACTCAGCATG |
| | 8403 | 21 | U1:Ex8:−87 | | | TCCA |
| chr5 | 17723 | 1772384 | NSD1:NM_001365684: | + | 1563 | CGGCAACTCAGCAT |
| | 8404 | 22 | U1:Ex8:−86 | | | GTCC |
| chr5 | 17723 | 1772384 | NSD1:NM_001365684: | + | 1564 | GCGGCAACTCAGCA |
| | 8405 | 23 | U1:Ex8:−85 | | | TGTC |
| chr5 | 17723 | 1772384 | NSD1:NM_001365684: | + | 1565 | TGCGGCAACTCAGC |
| | 8406 | 24 | U1:Ex8:−84 | | | ATGT |
| chr5 | 17723 | 1772384 | NSD1:NM_001365684: | + | 1566 | CTGCGGCAACTCAG |
| | 8407 | 25 | U1:Ex8:−83 | | | CATG |
| chr5 | 17723 | 1772384 | NSD1:NM_001365684: | + | 1567 | GCTGCGGCAACTCA |
| | 8408 | 26 | U1:Ex8:−82 | | | GCAT |
| chr5 | 17723 | 1772384 | NSD1:NM_001365684: | + | 1568 | AGCTGCGGCAACTC |
| | 8409 | 27 | U1:Ex8:−81 | | | AGCA |
| chr5 | 17723 | 1772384 | NSD1:NM_001365684: | + | 1569 | CAGCTGCGGCAACT |
| | 8410 | 28 | U1:Ex8:−80 | | | CAGC |
| chr5 | 17723 | 1772384 | NSD1:NM_001365684: | + | 1570 | TCAGCTGCGGCAAC |
| | 8411 | 29 | U1:Ex8:−79 | | | TCAG |
| chr5 | 17723 | 1772384 | NSD1:NM_001365684: | + | 1571 | GTCAGCTGCGGCAA |
| | 8412 | 30 | U1:Ex8:−78 | | | CTCA |
| chr5 | 17723 | 1772384 | NSD1:NM_001365684: | + | 1572 | GGTCAGCTGCGGCA |
| | 8413 | 31 | U1:Ex8:−77 | | | ACTC |
| chr5 | 17723 | 1772384 | NSD1:NM_001365684: | + | 1573 | AGGTCAGCTGCGGC |
| | 8414 | 32 | U1:Ex8:−76 | | | AACT |
| chr5 | 17723 | 1772384 | NSD1:NM_001365684: | + | 1574 | AAGGTCAGCTGCGG |
| | 8415 | 33 | U1:Ex8:−75 | | | CAAC |
| chr5 | 17723 | 1772384 | NSD1:NM_001365684: | + | 1575 | CAAGGTCAGCTGCG |
| | 8416 | 34 | U1:Ex8:−74 | | | GCAA |
| chr5 | 17723 | 1772384 | NSD1:NM_001365684: | + | 1576 | ACAAGGTCAGCTGC |
| | 8417 | 35 | Ex8:−73 | | | GGCA |
| chr5 | 17723 | 1772384 | NSD1:NM_001365684: | + | 1577 | GACAAGGTCAGCTG |
| | 8418 | 36 | U1:Ex8:−72 | | | CGGC |
| chr5 | 17723 | 1772384 | NSD1:NM_001365684: | + | 1578 | AGACAAGGTCAGCT |
| | 8419 | 37 | U1:Ex8:−71 | | | GCGG |
| chr5 | 17723 | 1772384 | NSD1:NM_001365684: | + | 1579 | CAGACAAGGTCAGC |
| | 8420 | 38 | U1:Ex8:−70 | | | TGCG |
| chr5 | 17723 | 1772384 | NSD1:NM_001365684: | + | 1580 | ACAGACAAGGTCAG |
| | 8421 | 39 | U1:Ex8:−69 | | | CTGC |
| chr5 | 17723 | 1772384 | NSD1:NM_001365684: | + | 1581 | CACAGACAAGGTCA |
| | 8422 | 40 | U1:Ex8:−68 | | | GCTG |
| chr5 | 17723 | 1772384 | NSD1:NM_001365684: | + | 1582 | GCACAGACAAGGTC |
| | 8423 | 41 | U1:Ex8:−67 | | | AGCT |
| chr5 | 17723 | 1772384 | NSD1:NM_001365684: | + | 1583 | GGCACAGACAAGGT |
| | 8424 | 42 | U1:Ex8:−66 | | | CAGC |
| chr5 | 17723 | 1772384 | NSD1:NM_001365684: | + | 1584 | AGGCACAGACAAGG |
| | 8425 | 43 | U1:Ex8:−65 | | | TCAG |
| chr5 | 17723 | 1772384 | NSD1:NM_001365684: | 1 | 1585 | CAGGCACAGACAAG |
| | 8426 | 44 | U1:Ex8:−64 | | | GTCA |
| chr5 | 17723 | 1772384 | NSD1:NM_001365684: | + | 1586 | ACAGGCACAGACAA |
| | 8427 | 45 | U1:Ex8:−63 | | | GGTC |
| chr5 | 17723 | 1772384 | NSD1:NM_001365684: | + | 1587 | CACAGGCACAGACA |
| | 8428 | 46 | U1:Ex8:−62 | | | AGGT |
| chr5 | 17723 | 1772384 | NSD1:NM_001365684: | + | 1588 | CCACAGGCACAGAC |
| | 8429 | 47 | U1:Ex8:−61 | | | AAGG |
| chr5 | 17723 | 1772384 | NSD1:NM_001365684: | + | 1589 | GCCACAGGCACAGA |
| | 8430 | 48 | U1:Ex8:−60 | | | CAAG |
| chr5 | 17723 | 1772384 | NSD1:NM_001365684: | + | 1590 | AGCCACAGGCACAG |
| | 8431 | 49 | U1:Ex8:−59 | | | ACAA |
| chr5 | 17723 | 1772384 | NSD1:NM_001365684: | + | 1591 | GAGCCACAGGCACA |
| | 8432 | 50 | U1:Ex8:−58 | | | GACA |
| chr5 | 17723 | 1772384 | NSD1:NM_001365684: | + | 1592 | GGAGCCACAGGCAC |
| | 8433 | 51 | U1:Ex8:−57 | | | AGAC |
| chr5 | 17723 | 1772384 | NSD1:NM_001365684: | + | 1593 | CGGAGCCACAGGCA |
| | 8434 | 52 | U1:Ex8:−56 | | | CAGA |
| chr5 | 17723 | 1772384 | NSD1:NM_001365684: | + | 1594 | CCGGAGCCACAGGC |
| | 8435 | 53 | U1:Ex8:−55 | | | ACAG |
| chr5 | 17723 | 1772384 | NSD1:NM_001365684: | + | 1595 | TCCGGAGCCACAGG |
| | 8436 | 54 | U1:Ex8:−54 | | | CACA |
| chr5 | 17723 | 1772384 | NSD1:NM_001365684: | + | 1596 | TTCCGGAGCCACAG |
| | 8437 | 55 | U1:Ex8:−53 | | | GCAC |
| chr5 | 17723 | 1772384 | NSD1:NM_001365684: | + | 1597 | CTTCCGGAGCCACA |
| | 8438 | 56 | U1:Ex8:−52 | | | GGCA |
| chr5 | 17723 | 1772384 | NSD1:NM_001365684: | + | 1598 | ACTTCCGGAGCCAC |
| | 8439 | 57 | U1:Ex8:−51 | | | AGGC |
| chr5 | 17723 | 1772384 | NSD1:NM_001365684: | + | 1599 | GACTTCCGGAGCCA |
| | 8440 | 58 | U1:Ex8:−50 | | | CAGG |
| chr5 | 17723 | 1772384 | NSD1:NM_001365684: | + | 1600 | AGACTTCCGGAGCC |
| | 8441 | 59 | U1:Ex8:−49 | | | ACAG |
| chr5 | 17723 | 1772384 | NSD1:NM_001365684: | + | 1601 | GAGACTTCCGGAGC |
| | 8442 | 60 | U1:Ex8:−48 | | | CACA |
| chr5 | 17723 | 1772384 | NSD1:NM_001365684: | + | 1602 | AGAGACTTCCGGAG |
| | 8443 | 61 | U1:Ex8:−47 | | | CCAC |
| chr5 | 17723 | 1772384 | NSD1:NM_001365684: | + | 1603 | GAGAGACTTCCGGA |
| | 8444 | 62 | U1:Ex8:−46 | | | GCCA |
| chr5 | 17723 | 1772384 | NSD1:NM_001365684: | + | 1604 | GGAGAGACTTCCGG |
| | 8445 | 63 | U1:Ex8:−45 | | | AGCC |
| chr5 | 17723 | 1772384 | NSD1:NM_001365684: | + | 1605 | TGGAGAGACTTCCG |
| | 8446 | 64 | U1:Ex8:−44 | | | GAGC |
| chr5 | 17723 | 1772384 | NSD1:NM_001365684: | + | 1606 | GTGGAGAGACTTCC |
| | 8447 | 65 | U1:Ex8:−43 | | | GGAG |
| chr5 | 17723 | 1772384 | NSD1:NM_001365684: | + | 1607 | CGTGGAGAGACTTC |
| | 8448 | 66 | Ex8:−42 | | | CGGA |
| chr5 | 17723 | 1772384 | NSD1:NM_001365684: | + | 1608 | CCGTGGAGAGACTT |
| | 8449 | 67 | U1:Ex8:−41 | | | CCGG |
| chr5 | 17723 | 1772384 | NSD1:NM_001365684: | + | 1609 | GCCGTGGAGAGACT |
| | 8450 | 68 | U1:Ex8:−40 | | | TCCG |
| chr5 | 17723 | 1772384 | NSD1:NM_001365684: | + | 1610 | GGCCGTGGAGAGAC |
| | 8451 | 69 | U1:Ex8:−39 | | | TTCC |
| chr5 | 17723 | 1772384 | NSD1:NM_001365684: | + | 1611 | AGGCCGTGGAGAGA |
| | 8452 | 70 | U1:Ex8:−38 | | | CTTC |
| chr5 | 17723 | 1772384 | NSD1:NM_001365684: | + | 1612 | CAGGCCGTGGAGAG |
| | 8453 | 71 | U1:Ex8:−37 | | | ACTT |
| chr5 | 17723 | 1772384 | NSD1:NM_001365684: | + | 1613 | GCAGGCCGTGGAGA |
| | 8454 | 72 | U1:Ex8:−36 | | | GACT |
| chr5 | 17723 | 1772384 | NSD1:NM_001365684: | + | 1614 | GGCAGGCCGTGGAG |
| | 8455 | 73 | U1:Ex8:−35 | | | AGAC |
| chr5 | 17723 | 1772384 | NSD1:NM_001365684: | + | 1615 | GGGCAGGCCGTGGA |
| | 8456 | 74 | U1:Ex8:−34 | | | GAGA |
| chr5 | 17723 | 1772384 | NSD1:NM_001365684: | + | 1616 | AGGGCAGGCCGTGG |
| | 8457 | 75 | U1:Ex8:−33 | | | AGAG |
| chr5 | 17723 | 1772384 | NSD1:NM_001365684: | + | 1617 | AAGGGCAGGCCGTG |
| | 8458 | 76 | U1:Ex8:−32 | | | GAGA |
| chr5 | 17723 | 1772384 | NSD1:NM_001365684: | 1 | 1618 | CAAGGGCAGGCCGT |
| | 8459 | 77 | U1:Ex8:−31 | | | GGAG |
| chr5 | 17723 | 1772384 | NSD1:NM_001365684: | + | 1619 | TCAAGGGCAGGCCG |
| | 8460 | 78 | U1:Ex8:−30 | | | TGGA |
| chr5 | 17723 | 1772384 | NSD1:NM_001365684: | 1 | 1620 | CTCAAGGGCAGGCC |
| | 8461 | 79 | U1:Ex8:−29 | | | GTGG |
| chr5 | 17723 | 1772384 | NSD1:NM_001365684: | + | 1621 | ACTCAAGGGCAGGC |
| | 8462 | 80 | U1:Ex8:−28 | | | CGTG |
| chr5 | 17723 | 1772384 | NSD1:NM_001365684: | + | 1622 | GACTCAAGGGCAGG |
| | 8463 | 81 | U1:Ex8:−27 | | | CCGT |
| chr5 | 17723 | 1772384 | NSD1:NM_001365684: | 1 | 1623 | AGACTCAAGGGCAG |
| | 8464 | 82 | U1:Ex8:−26 | | | GCCG |
| chr5 | 17723 | 1772384 | NSD1:NM_001365684: | 1 | 1624 | CAGACTCAAGGGCA |
| | 8465 | 83 | U1:Ex8:−25 | | | GGCC |
| chr5 | 17723 | 1772384 | NSD1:NM_001365684: | + | 1625 | TCAGACTCAAGGGC |
| | 8466 | 84 | U1:Ex8:−24 | | | AGGC |
| chr5 | 17723 | 1772384 | NSD1:NM_001365684: | + | 1626 | CTCAGACTCAAGGG |
| | 8467 | 85 | U1:Ex8:−23 | | | CAGG |
| chr5 | 17723 | 1772384 | NSD1:NM_001365684: | 1 | 1627 | CCTCAGACTCAAGG |
| | 8468 | 86 | U1:Ex8:−22 | | | GCAG |
| chr5 | 17723 | 1772384 | NSD1:NM_001365684: | + | 1628 | TCCTCAGACTCAAG |
| | 8469 | 87 | U1:Ex8:−21 | | | GGCA |
| chr5 | 17723 | 1772384 | NSD1:NM_001365684: | + | 1629 | TTCCTCAGACTCAAG |
| | 8470 | 88 | U1:Ex8:−20 | | | GGC |
| chr5 | 17723 | 1772384 | NSD1:NM_001365684: | + | 1630 | ATTCCTCAGACTCAA |
| | 8471 | 89 | U1:Ex8:−19 | | | GGG |
| chr5 | 17723 | 1772384 | NSD1:NM_001365684: | + | 1631 | AATTCCTCAGACTCA |
| | 8472 | 90 | U1:Ex8:−18 | | | AGG |
| chr5 | 17723 | 1772384 | NSD1:NM_001365684: | + | 1632 | CAATTCCTCAGACTC |
| | 8473 | 91 | U1:Ex8:−17 | | | AAG |
| chr5 | 17723 | 1772384 | NSD1:NM_001365684: | + | 1633 | GCAATTCCTCAGACT |
| | 8474 | 92 | U1:Ex8:−16 | | | CAA |
| chr5 | 17723 | 1772384 | NSD1:NM_001365684: | 1 | 1634 | AGCAATTCCTCAGA |
| | 8475 | 93 | U1:Ex8:−15 | | | CTCA |
| chr5 | 17723 | 1772384 | NSD1:NM_001365684: | + | 1635 | TAGCAATTCCTCAGA |
| | 8476 | 94 | U1:Ex8:−14 | | | CTC |
| chr5 | 17723 | 1772384 | NSD1:NM_001365684: | + | 1636 | CTAGCAATTCCTCAG |
| | 8477 | 95 | U1:Ex8:−13 | | | ACT |
| chr5 | 17723 | 1772384 | NSD1:NM_001365684: | + | 1637 | ACTAGCAATTCCTCA |
| | 8478 | 96 | U1:Ex8:−12 | | | GAC |
| chr5 | 17723 | 1772384 | NSD1:NM_001365684: | + | 1638 | AACTAGCAATTCCTC |
| | 8479 | 97 | U1:Ex8:−11 | | | AGA |
| chr5 | 17723 | 1772384 | NSD1:NM_001365684: | + | 1639 | TAACTAGCAATTCCT |
| | 8480 | 98 | U1:Ex8:−10 | | | CAG |
| chr5 | 17723 | 1772384 | NSD1:NM_001365684: | + | 1640 | TTAACTAGCAATTCC |
| | 8481 | 99 | U1:Ex8:−9 | | | TCA |
| chr5 | 17723 | 1772385 | NSD1:NM_001365684: | + | 1641 | TTTAACTAGCAATTC |
| | 8482 | 00 | U1:Ex8:−8 | | | CTC |
| chr5 | 17723 | 1772385 | NSD1:NM_001365684: | + | 1642 | TTTTAACTAGCAATT |
| | 8483 | 01 | U1:Ex8:−7 | | | CCT |
| chr5 | 17723 | 1772385 | NSD1:NM_001365684: | + | 1643 | GTTTTAACTAGCAAT |
| | 8484 | 02 | U1:Ex8:−6 | | | TCC |
| chr5 | 17723 | 1772385 | NSD1:NM_001365684: | + | 1644 | CGTTTTAACTAGCAA |
| | 8485 | 03 | U1:Ex8:−5 | | | TTC |
| chr5 | 17723 | 1772385 | NSD1:NM_001365684: | + | 1645 | GCGTTTTAACTAGCA |
| | 8486 | 04 | U1:Ex8:−4 | | | ATT |
| chr5 | 17723 | 1772385 | NSD1:NM_001365684: | + | 1646 | CCAACCCCACCTTAC |
| | 8504 | 22 | U1:Ex8-IVS8:−3 | | | CTG |
| chr5 | 17723 | 1772385 | NSD1:NM_001365684: | + | 1647 | CCCAACCCCACCTTA |
| | 8505 | 23 | U1:Ex8-IVS8:−2 | | | CCT |
| chr5 | 17723 | 1772385 | NSD1:NM_001365684: | + | 1648 | CCCCAACCCCACCTT |
| | 8506 | 24 | U1:Ex8-IVS8:−1 | | | ACC |
| chr5 | 17723 | 1772385 | NSD1:NM_001365684: | + | 1649 | ACCCCAACCCCACCT |
| | 8507 | 25 | U1:IVS8:1 | | | TAC |
| chr5 | 17723 | 1772385 | NSD1:NM_001365684: | + | 1650 | GACCCCAACCCCAC |
| | 8508 | 26 | U1:IVS8:2 | | | CTTA |
| chr5 | 17723 | 1772385 | NSD1:NM_001365684: | + | 1651 | AGACCCCAACCCCA |
| | 8509 | 27 | U1:IVS8:3 | | | CCTT |
| chr5 | 17723 | 1772385 | NSD1:NM_001365684: | + | 1652 | GAGACCCCAACCCC |
| | 8510 | 28 | U1:IVS8:4 | | | ACCT |
| chr5 | 17723 | 1772385 | NSD1:NM_001365684: | + | 1653 | TGAGACCCCAACCC |
| | 8511 | 29 | U1:IVS8:5 | | | CACC |
| chr5 | 17723 | 1772385 | NSD1:NM_001365684: | + | 1654 | CTGAGACCCCAACC |
| | 8512 | 30 | U1:IVS8:6 | | | CCAC |
| chr5 | 17723 | 1772385 | NSD1:NM_001365684: | + | 1655 | ACTGAGACCCCAAC |
| | 8513 | 31 | U1:IVS8:7 | | | CCCA |
| chr5 | 17723 | 1772385 | NSD1:NM_001365684: | + | 1656 | TACTGAGACCCCAA |
| | 8514 | 32 | U1:IVS8:8 | | | CCCC |
| chr5 | 17723 | 1772385 | NSD1:NM_001365684: | + | 1657 | ATACTGAGACCCCA |
| | 8515 | 33 | U1:IVS8:9 | | | ACCC |
| chr5 | 17723 | 1772385 | NSD1:NM_001365684: | + | 1658 | AATACTGAGACCCC |
| | 8516 | 34 | U1:IVS8:10 | | | AACC |
| chr5 | 17723 | 1772385 | NSD1:NM_001365684: | + | 1659 | AAATACTGAGACCC |
| | 8517 | 35 | U1:IVS8:11 | | | CAAC |
| chr5 | 17723 | 1772385 | NSD1:NM_001365684: | + | 1660 | CAAATACTGAGACC |
| | 8518 | 36 | U1:IVS8:12 | | | CCAA |
| chr5 | 17723 | 1772385 | NSD1:NM_001365684: | + | 1661 | TCAAATACTGAGAC |
| | 8519 | 37 | U1:IVS8:13 | | | CCCA |
| chr5 | 17723 | 1772385 | NSD1:NM_001365684: | + | 1662 | CTCAAATACTGAGA |
| | 8520 | 38 | U1:IVS8:14 | | | CCCC |
| chr5 | 17723 | 1772385 | NSD1:NM_001365684: | + | 1663 | GCTCAAATACTGAG |
| | 8521 | 39 | U1:IVS8:15 | | | ACCC |
| chr5 | 17723 | 1772385 | NSD1:NM_001365684: | + | 1664 | TGCTCAAATACTGA |
| | 8522 | 40 | U1:IVS8:16 | | | GACC |
| chr5 | 17723 | 1772385 | NSD1:NM_001365684: | + | 1665 | CTGCTCAAATACTGA |
| | 8523 | 41 | U1:IVS8:17 | | | GAC |
| chr5 | 17723 | 1772385 | NSD1:NM_001365684: | + | 1666 | TCTGCTCAAATACTG |
| | 8524 | 42 | U1:IVS8:18 | | | AGA |
| chr5 | 17723 | 1772385 | NSD1:NM_001365684: | + | 1667 | ATCTGCTCAAATACT |
| | 8525 | 43 | U1:IVS8:19 | | | GAG |
| chr5 | 17723 | 1772385 | NSD1:NM_001365684: | + | 1668 | TATCTGCTCAAATAC |
| | 8526 | 44 | U1:IVS8:20 | | | TGA |
| chr5 | 17723 | 1772385 | NSD1:NM_001365684: | + | 1669 | ATATCTGCTCAAATA |
| | 8527 | 45 | U1:IVS8:21 | | | CTG |
| chr5 | 17723 | 1772385 | NSD1:NM_001365684: | + | 1670 | CATATCTGCTCAAAT |
| | 8528 | 46 | U1:IVS8:22 | | | ACT |
| chr5 | 17723 | 1772385 | NSD1:NM_001365684: | + | 1671 | TCATATCTGCTCAAA |
| | 8529 | 47 | U1:IVS8:23 | | | TAC |
| chr5 | 17723 | 1772385 | NSD1:NM_001365684: | + | 1672 | ATCATATCTGCTCAA |
| | 8530 | 48 | U1:IVS8:24 | | | ATA |
| chr5 | 17723 | 1772385 | NSD1:NM_001365684: | + | 1673 | AATCATATCTGCTCA |
| | 8531 | 49 | U1:IVS8:25 | | | AAT |
| chr5 | 17723 | 1772385 | NSD1:NM_001365684: | + | 1674 | TAATCATATCTGCTC |
| | 8532 | 50 | U1:IVS8:26 | | | AAA |
| chr5 | 17723 | 1772385 | NSD1:NM_001365684: | + | 1675 | CTAATCATATCTGCT |
| | 8533 | 51 | U1:IVS8:27 | | | CAA |
| chr5 | 17723 | 1772385 | NSD1:NM_001365684: | + | 1676 | TCTAATCATATCTGC |
| | 8534 | 52 | U1:IVS8:28 | | | TCA |
| chr5 | 17723 | 1772385 | NSD1:NM_001365684: | + | 1677 | CTCTAATCATATCTG |
| | 8535 | 53 | U1:IVS8:29 | | | CTC |
| chr5 | 17723 | 1772385 | NSD1:NM_001365684: | + | 1678 | CCTCTAATCATATCT |
| | 8536 | 54 | U1:IVS8:30 | | | GCT |
| chr5 | 17723 | 1772385 | NSD1:NM_001365684: | + | 1679 | TCCTCTAATCATATC |
| | 8537 | 55 | U1:IVS8:31 | | | TGC |
| chr5 | 17723 | 1772385 | NSD1:NM_001365684: | + | 1680 | TTCCTCTAATCATAT |
| | 8538 | 56 | U1:IVS8:32 | | | CTG |
| chr5 | 17723 | 1772385 | NSD1:NM_001365684: | + | 1681 | CTTCCTCTAATCATA |
| | 8539 | 57 | U1:IVS8:33 | | | TCT |
| chr5 | 17723 | 1772385 | NSD1:NM_001365684: | + | 1682 | GCTTCCTCTAATCAT |
| | 8540 | 58 | U1:IVS8:34 | | | ATC |
| chr5 | 17723 | 1772385 | NSD1:NM_001365684: | + | 1683 | TGCTTCCTCTAATCA |
| | 8541 | 59 | U1:IVS8:35 | | | TAT |
| chr5 | 17723 | 1772385 | NSD1:NM_001365684: | + | 1684 | CTGCTTCCTCTAATC |
| | 8542 | 60 | U1:IVS8:36 | | | ATA |
| chr5 | 17723 | 1772385 | NSD1:NM_001365684: | + | 1685 | CCTGCTTCCTCTAAT |
| | 8543 | 61 | U1:IVS8:37 | | | CAT |
| chr5 | 17723 | 1772385 | NSD1:NM_001365684: | + | 1686 | TCCTGCTTCCTCTAA |
| | 8544 | 62 | U1:IVS8:38 | | | TCA |
| chr5 | 17723 | 1772385 | NSD1:NM_001365684: | 1 | 1687 | CTCCTGCTTCCTCTA |
| | 8545 | 63 | U1:IVS8:39 | | | ATC |
| chr5 | 17723 | 1772385 | NSD1:NM_001365684: | + | 1688 | TCTCCTGCTTCCTCT |
| | 8546 | 64 | U1:IVS8:40 | | | AAT |
| chr5 | 17723 | 1772385 | NSD1:NM_001365684: | + | 1689 | ATCTCCTGCTTCCTC |
| | 8547 | 65 | U1:IVS8:41 | | | TAA |
| chr5 | 17723 | 1772385 | NSD1:NM_001365684: | + | 1690 | AATCTCCTGCTTCCT |
| | 8548 | 66 | U1:IVS8:42 | | | CTA |
| chr5 | 17723 | 1772385 | NSD1:NM_001365684: | + | 1691 | AAATCTCCTGCTTCC |
| | 8549 | 67 | U1:IVS8:43 | | | TCT |
| chr5 | 17723 | 1772385 | NSD1:NM_001365684: | + | 1692 | AAAATCTCCTGCTTC |
| | 8550 | 68 | U1:IVS8:44 | | | CTC |
| chr5 | 17723 | 1772385 | NSD1:NM_001365684: | + | 1693 | TAAAATCTCCTGCTT |
| | 8551 | 69 | U1:IVS8:45 | | | CCT |
| chr5 | 17723 | 1772385 | NSD1:NM_001365684: | + | 1694 | CTAAAATCTCCTGCT |
| | 8552 | 70 | U1:IVS8:46 | | | TCC |
| chr5 | 17723 | 1772385 | NSD1:NM_001365684: | + | 1695 | ACTAAAATCTCCTGC |
| | 8553 | 71 | U1:IVS8:47 | | | TTC |
| chr5 | 17723 | 1772385 | NSD1:NM_001365684: | + | 1696 | TACTAAAATCTCCTG |
| | 8554 | 72 | U1:IVS8:48 | | | CTT |
| chr5 | 17723 | 1772385 | NSD1:NM_001365684: | + | 1697 | ATACTAAAATCTCCT |
| | 8555 | 73 | U1:IVS8:49 | | | GCT |
| chr5 | 17723 | 1772385 | NSD1:NM_001365684: | + | 1698 | CATACTAAAATCTCC |
| | 8556 | 74 | U1:IVS8:50 | | | TGC |
| chr5 | 17723 | 1772385 | NSD1:NM_001365684: | + | 1699 | ACATACTAAAATCTC |
| | 8557 | 75 | U1:IVS8:51 | | | CTG |
| chr5 | 17723 | 1772385 | NSD1:NM_001365684: | + | 1700 | AACATACTAAAATC |
| | 8558 | 76 | U1:IVS8:52 | | | TCCT |
| chr5 | 17723 | 1772385 | NSD1:NM_001365684: | + | 1701 | AAACATACTAAAAT |
| | 8559 | 77 | U1:IVS8:53 | | | CTCC |
| chr5 | 17723 | 1772385 | NSD1:NM_001365684: | + | 1702 | AAAACATACTAAAA |
| | 8560 | 78 | U1:IVS8:54 | | | TCTC |
| chr5 | 17723 | 1772385 | NSD1:NM_001365684: | + | 1703 | CAAAACATACTAAA |
| | 8561 | 79 | U1:IVS8:55 | | | ATCT |
| chr5 | 17723 | 1772385 | NSD1:NM_001365684: | + | 1704 | TCAAAACATACTAA |
| | 8562 | 80 | U1:IVS8:56 | | | AATC |
| chr5 | 17723 | 1772385 | NSD1:NM_001365684: | + | 1705 | ATCAAAACATACTA |
| | 8563 | 81 | U1:IVS8:57 | | | AAAT |
| chr5 | 17723 | 1772385 | NSD1:NM_001365684: | + | 1706 | CATCAAAACATACT |
| | 8564 | 82 | U1:IVS8:58 | | | AAAA |
| chr5 | 17723 | 1772385 | NSD1:NM_001365684: | + | 1707 | ACATCAAAACATAC |
| | 8565 | 83 | U1:IVS8:59 | | | TAAA |
| chr5 | 17723 | 1772385 | NSD1:NM_001365684: | + | 1708 | TACATCAAAACATA |
| | 8566 | 84 | U1:IVS8:60 | | | CTAA |
| chr5 | 17723 | 1772385 | NSD1:NM_001365684: | + | 1709 | TTACATCAAAACAT |
| | 8567 | 85 | U1:IVS8:61 | | | ACTA |
| chr5 | 17723 | 1772385 | NSD1:NM_001365684: | + | 1710 | TTTACATCAAAACAT |
| | 8568 | 86 | U1:IVS8:62 | | | ACT |
| chr5 | 17723 | 1772385 | NSD1:NM_001365684: | + | 1711 | CTTTACATCAAAACA |
| | 8569 | 87 | U1:IVS8:63 | | | TAC |
| chr5 | 17723 | 1772385 | NSD1:NM_001365684: | + | 1712 | GCTTTACATCAAAAC |
| | 8570 | 88 | U1:IVS8:64 | | | ATA |
| chr5 | 17723 | 1772385 | NSD1:NM_001365684: | + | 1713 | GGCTTTACATCAAA |
| | 8571 | 89 | U1:IVS8:65 | | | ACAT |
| chr5 | 17723 | 1772385 | NSD1:NM_001365684: | + | 1714 | TGGCTTTACATCAAA |
| | 8572 | 90 | U1:IVS8:66 | | | ACA |
| chr5 | 17723 | 1772385 | NSD1:NM_001365684: | + | 1715 | TTGGCTTTACATCAA |
| | 8573 | 91 | U1:IVS8:67 | | | AAC |
| chr5 | 17723 | 1772385 | NSD1:NM_001365684: | + | 1716 | GTTGGCTTTACATCA |
| | 8574 | 92 | U1:IVS8:68 | | | AAA |
| chr5 | 17723 | 1772385 | NSD1:NM_001365684: | + | 1717 | TGTTGGCTTTACATC |
| | 8575 | 93 | U1:IVS8:69 | | | AAA |
| chr5 | 17723 | 1772385 | NSD1:NM_001365684: | + | 1718 | ATGTTGGCTTTACAT |
| | 8576 | 94 | U1:IVS8:70 | | | CAA |
| chr5 | 17723 | 1772385 | NSD1:NM_001365684: | + | 1719 | AATGTTGGCTTTACA |
| | 8577 | 95 | U1:IVS8:71 | | | TCA |
| chr5 | 17723 | 1772385 | NSD1:NM_001365684: | + | 1720 | CAATGTTGGCTTTAC |
| | 8578 | 96 | U1:IVS8:72 | | | ATC |
| chr5 | 17723 | 1772385 | NSD1:NM_001365684: | + | 1721 | ACAATGTTGGCTTTA |
| | 8579 | 97 | U1:IVS8:73 | | | CAT |
| chr5 | 17723 | 1772385 | NSD1:NM_001365684: | + | 1722 | TACAATGTTGGCTTT |
| | 8580 | 98 | U1:IVS8:74 | | | ACA |
| chr5 | 17723 | 1772385 | NSD1:NM_001365684: | + | 1723 | ATACAATGTTGGCTT |
| | 8581 | 99 | U1:IVS8:75 | | | TAC |
| chr5 | 17723 | 1772386 | NSD1:NM_001365684: | + | 1724 | GATACAATGTTGGCT |
| | 8582 | 00 | U1:IVS8:76 | | | TTA |
| chr5 | 17723 | 1772386 | NSD1:NM_001365684: | + | 1725 | AGATACAATGTTGG |
| | 8583 | 01 | U1:IVS8:77 | | | CTTT |
| chr5 | 17723 | 1772386 | NSD1:NM_001365684: | + | 1726 | TAGATACAATGTTG |
| | 8584 | 02 | U1:IVS8:78 | | | GCTT |
| chr5 | 17723 | 1772386 | NSD1:NM_001365684: | + | 1727 | ATAGATACAATGTT |
| | 8585 | 03 | U1:IVS8:79 | | | GGCT |
| chr5 | 17723 | 1772386 | NSD1:NM_001365684: | + | 1728 | TATAGATACAATGTT |
| | 8586 | 04 | U1:IVS8:80 | | | GGC |
| chr5 | 17723 | 1772386 | NSD1:NM_001365684: | + | 1729 | ATATAGATACAATG |
| | 8587 | 05 | U1:IVS8:81 | | | TTGG |
| chr5 | 17723 | 1772386 | NSD1:NM_001365684: | + | 1730 | TATATAGATACAAT |
| | 8588 | 06 | U1:IVS8:82 | | | GTTG |
| chr5 | 17723 | 1772386 | NSD1:NM_001365684: | + | 1731 | GTATATAGATACAA |
| | 8589 | 07 | U1:IVS8:83 | | | TGTT |
| chr5 | 17723 | 1772386 | NSD1:NM_001365684: | + | 1732 | TGTATATAGATACA |
| | 8590 | 08 | U1:IVS8:84 | | | ATGT |
| chr5 | 17723 | 1772386 | NSD1:NM_001365684: | + | 1733 | TTGTATATAGATACA |
| | 8591 | 09 | U1:IVS8:85 | | | ATG |
| chr5 | 17723 | 1772386 | NSD1:NM_001365684: | + | 1734 | ATTGTATATAGATAC |
| | 8592 | 10 | U1:IVS8:86 | | | AAT |
| chr5 | 17723 | 1772386 | NSD1:NM_001365684: | + | 1735 | TATTGTATATAGATA |
| | 8593 | 11 | U1:IVS8:87 | | | CAA |
| chr5 | 17723 | 1772386 | NSD1:NM_001365684: | + | 1736 | TTATTGTATATAGAT |
| | 8594 | 12 | U1:IVS8:88 | | | ACA |
| chr5 | 17723 | 1772386 | NSD1:NM_001365684: | + | 1737 | TTTATTGTATATAGA |
| | 8595 | 13 | U1:IVS8:89 | | | TAC |
| chr5 | 17723 | 1772386 | NSD1:NM_001365684: | + | 1738 | GTTTATTGTATATAG |
| | 8596 | 14 | U1:IVS8:90 | | | ATA |
| chr5 | 17723 | 1772386 | NSD1:NM_001365684: | + | 1739 | AGTTTATTGTATATA |
| | 8597 | 15 | U1:IVS8:91 | | | GAT |
| chr5 | 17723 | 1772386 | NSD1:NM_001365684: | + | 1740 | TAGTTTATTGTATAT |
| | 8598 | 16 | U1:IVS8:92 | | | AGA |
| chr5 | 17723 | 1772386 | NSD1:NM_001365684: | + | 1741 | GTAGTTTATTGTATA |
| | 8599 | 17 | U1:IVS8:93 | | | TAG |
| chr5 | 17723 | 1772386 | NSD1:NM_001365684: | + | 1742 | GGTAGTTTATTGTAT |
| | 8600 | 18 | U1:IVS8:94 | | | ATA |
| chr5 | 17723 | 1772386 | NSD1:NM_001365684: | + | 1743 | GGGTAGTTTATTGTA |
| | 8601 | 19 | U1:IVS8:95 | | | TAT |
| chr5 | 17723 | 1772386 | NSD1:NM_001365684: | + | 1744 | GGGGTAGTTTATTGT |
| | 8602 | 20 | U1:IVS8:96 | | | ATA |
| chr5 | 17723 | 1772386 | NSD1:NM_001365684: | + | 1745 | GGGGGTAGTTTATTG |
| | 8603 | 21 | U1:IVS8:97 | | | TAT |
| chr5 | 17723 | 1772386 | NSD1:NM_001365684: | + | 1746 | AGGGGGTAGTTTATT |
| | 8604 | 22 | U1:IVS8:98 | | | GTA |
| chr5 | 17723 | 1772386 | NSD1:NM_001365684: | + | 1747 | AAGGGGGTAGTTTA |
| | 8605 | 23 | U1:IVS8:99 | | | TTGT |
| chr5 | 17723 | 1772386 | NSD1:NM_001365684: | + | 1748 | AAAGGGGGTAGTTT |
| | 8606 | 24 | U1:IVS8:100 | | | ATTG |

TABLE 5F
Exemplary U1 Vector Sequences

| | | SEQ ID |
|---|---|---|
| Region | Sequence | NO: |
| Promoter | gctccatctggccaccgaaaggttgctccttaacacaggctaaggaccagcttctttgggagagaaca | 1761 |
| sequence | gacgcaggggcgggagggaaaaagggagaggcagacgtcacttccccttggcggctctggcagcagatt | |
| (Human U1 | ggtcggttgagtggcagaaaggcagacggggactgggcaaggcactgtcggtgacatcacggacagg | |
| promoter) | gcgacttctatgtagatgaggcagcgcagaggctgctgcttcgccacttgctgcttcaccacgaagga | |
| | gttcccgtgccctgggagcgggttcaggaccgctgatcggaagtgagaatcccagctgtgtgtcaggg | |
| | ctggaaagggctcgggagtgcgcggggcaagtgaccgtgtgtgtaaagagtgaggcgtatgaggctgt | |
| | gtcggggcagaggcccaagatctc | |
| Wild-type U1 | acttacctg | |
| Antisense | | |
| sequence | | |
| Wild-type U1 | atacttacctggcaggggagataccatgatcacgaaggtggttttcccagggcgaggcttatccattg | 1762 |
| non-coding | cactccggatgtgctgacccctgcgatttccccaaatgtgggaaactcgactgcataatttgtggtag | |
| RNA | tgggggactgcgttcgcgctttcccctg | |
| sequence | Any of the ASO sequences from Table 4, Table 5A, Table 5B, Table 5D, | |
| ASO | Table 5E, and Table 5G | |
| sequences | | |
| replacing the | | |
| Wild-type U1 | | |
| Antisense | | |
| sequence | | |
| 3′ regulatory | actttctggagtttcaaaagtagactgtacgctaagggtcatatctttttttgttttggtttgtgtcttgg | 1763 |
| sequence | ttggcgtcttaaatgttaatcctacagtggagggctgcggaataggaagtaacatgtcgcctgcacgccat | |
| | aggagaaaaagcgagcatcagccgtatcggctttgtaacacaaattagctatcgtgaagtccgctcag | |
| Exemplary | gctccatctggccaccgaaaggttgctccttaacacaggctaaggaccagcttctttgggagagaacaga | 1764 |
| Full sequence | cgcaggggcgggagggaaaaagggagaggcagacgtcacttccccttggcggctctggcagcagattgg | |
| of wild-type | tcggttgagtggcagaaaggcagacggggactgggcaaggcactgtcggtgacatcacggacagggcg | |
| U1 snRNA | acttctatgtagatgaggcagcgcagaggctgctgcttcgccacttgctgcttcaccacgaaggagtt | |
| | cccgtgccctgggagcgggttcaggaccgctgatcggaagtgagaatcccagctgtgtgtcagggctg | |
| | gaaagggctcgggagtgcgcggggcaagtgaccgtgtgtgtaaagagtgaggcgtatgaggctgtgtc | |
| | ggggcagaggcccaagatctcatacttacctggcaggggagataccatgatcacgaaggtggttttcc | |
| | cagggcgaggcttatccattgcactccggatgtgctgacccctgcgatttccccaaatgtgggaaact | |
| | cgactgcataatttgtggtagtgggggactgcgttcgcgctttcccctgactttctggagtttcaaaa | |
| | gtagactgtacgctaagggtcatatctttttttgttttggtttgtgtcttggttggcgtcttaaatgt | |
| | taatcctacagtggagggctgcggaataggaagtaacatgtcgcctgcacgccataggagaaaaagcg | |
| | agcatcagccgtatcggctttgtaacacaaattagctatcgtgaagtccgctcag | |
| Full sequence | Gctccatctggccaccgaaaggttgctccttaacacaggctaaggaccagcttctttgggagagaacag | 1765 |
| of U1 snRNA | acgcaggggcgggagggaaaaagggagaggcagacgtcacttccccttggcggctctggcagcagat | |
| containing an | tggtcggttgagtggcagaaaggcagacggggactgggcaaggcactgtcggtgacatcacggacag | |
| ASO | ggcgacttctatgtagatgaggcagcgcagaggctgctgcttcgccacttgctgcttcaccacgaaggag | |
| sequence | ttcccgtgccctgggagcgggttcaggaccgctgatcggaagtgagaatcccagctgtgtgtcagggct | 1766 |
| replacing the | ggaaagggctcgggagtgcgcggggcaagtgaccgtgtgtgtaaagagtgaggcgtatgaggctgtgt | |
| antisense | cggggcagaggcccaagatctcat[ASO sequence] | |
| sequence of | gcaggggagataccatgatcacgaaggtggttttcccagggcgaggcttatccattgcactccggatgtg | |
| U1 snRNA | ctgacccctgcgatttccccaaatgtgggaaactcgactgcataatttgtggtagtgggggactgcgttcg | |
| | cgctttcccctgactttctggagtttcaaaagtagactgtacgctaagggtcatatctttttttgttttgg | |
| | tttgtgtcttggttggcgtcttaaatgttaatcctacagtggagggctgcggaataggaagtaacatgtcg | |
| | cctgcacgccataggagaaaaagcgagcatcagccgtatcggctttgtaacacaaattagctatcgtgaag | |
| | tccgctcag | |
| Exemplary | gctccatctggccaccgaaaggttgctccttaacacaggctaaggaccagcttctttgggagagaacaga | 1767 |
| full sequence | cgcaggggcgggagggaaaaagggagaggcagacgtcacttccccttggcggctctggcagcagatt | |
| of U1 snRNA | ggtcggttgagtggcagaaaggcagacggggactgggcaaggcactgtcggtgacatcacggacagg | |
| containing an | gcgacttctatgtagatgaggcagcgcagaggctgctgcttcgccacttgctgcttcaccacgaaggagtt | |
| ASO | cccgtgccctgggagcgggttcaggaccgctgatcggaagtgagaatcccagctgtgtgtcagggctg | |
| sequence | gaaagggctcgggagtgcgcggggcaagtgaccgtgtgtgtaaagagtgaggcgtatgaggctgtgtc | |
| replacing the | ggggcagaggcccaagatctcat | |
| antisense | ACAAAGGCTACAAAAAGTgcaggggagataccatgatcacgaaggtggttttcccag | |
| sequence of | ggcgaggcttatccattgcactccggatgtgctgacccctgcgatttccccaaatgtgggaaactcgactg | |
| U1 snRNA | cataatttgtggtagtgggggactgcgttcgcgctttcccctgactttctggagtttcaaaagtagactgt | |
| | acgctaagggtcatatctttttttgttttggtttgtgtcttggttggcgtcttaaatgttaatcctacagt | |
| | ggagggctgcggaataggaagtaacatgtcgcctgcacgccataggagaaaaagcgagcatcagccgtatc | |
| | ggctttgtaacacaaattagctatcgtgaagtccgctcag | |

TABLE 5G
Exemplary ASO Sequences

| | | | SEQ | |
|---|---|---|---|---|
| | | | ID | |
| chr | Start | End | NO: | ASO Sequence |
| chr5 | 177238123 | 177238141 | 110 | ACAAAGGCTACAAAAAGT |
| chr5 | 177238128 | 177238146 | 111 | TTCTGACAAAGGCTACAA |
| chr5 | 177238133 | 177238151 | 112 | TGAAATTCTGACAAAGGC |
| chr5 | 177238138 | 177238156 | 113 | AGGAATGAAATTCTGACA |
| chr5 | 177238143 | 177238161 | 114 | TTAAAAGGAATGAAATTC |
| chr5 | 177238148 | 177238166 | 115 | ACACTTTAAAAGGAATGA |
| chr5 | 177238153 | 177238171 | 116 | ATAACACACTTTAAAAGG |
| chr5 | 177238158 | 177238176 | 117 | AAAGAATAACACACTTTA |
| chr5 | 177238163 | 177238181 | 118 | GTCAAAAAGAATAACACA |
| chr5 | 177238168 | 177238186 | 119 | TAAGTGTCAAAAAGAATA |
| chr5 | 177238173 | 177238191 | 120 | TAATTTAAGTGTCAAAAA |
| chr5 | 177238178 | 177238196 | 121 | TGTTGTAATTTAAGTGTC |
| chr5 | 177238183 | 177238201 | 122 | AAAATTGTTGTAATTTAA |
| chr5 | 177238188 | 177238206 | 123 | AGGCCAAAATTGTTGTAA |
| chr5 | 177238193 | 177238211 | 124 | TCCACAGGCCAAAATTGT |
| chr5 | 177238198 | 177238216 | 125 | TAGAGTCCACAGGCCAAA |
| chr5 | 177238203 | 177238221 | 126 | AAAAATAGAGTCCACAGG |
| chr5 | 177238208 | 177238226 | 127 | AAAATAAAAATAGAGTCC |
| chr5 | 177238213 | 177238231 | 128 | AACAAAAAATAAAAATAG |
| chr5 | 177238218 | 177238236 | 129 | CTAAGAACAAAAAATAAA |
| chr5 | 177238223 | 177238241 | 130 | CTTACCTAAGAACAAAAA |
| chr5 | 177238228 | 177238246 | 131 | GGGAACTTACCTAAGAAC |
| chr5 | 177238233 | 177238251 | 132 | ACAGCGGGAACTTACCTA |
| chr5 | 177238236 | 177238254 | 133 | TTCACAGCGGGAACTTAC |
| chr5 | 177238237 | 177238255 | 134 | CTTCACAGCGGGAACTTA |
| chr5 | 177238241 | 177238259 | 135 | TCCTCTTCACAGCGGGAA |
| chr5 | 177238246 | 177238264 | 136 | GGCTTTCCTCTTCACAGC |
| chr5 | 177238251 | 177238269 | 137 | TAGAAGGCTTTCCTCTTC |
| chr5 | 177238256 | 177238274 | 138 | CGGGCTAGAAGGCTTTCC |
| chr5 | 177238261 | 177238279 | 139 | GACCTCGGGCTAGAAGGC |
| chr5 | 177238266 | 177238284 | 140 | AGATCGACCTCGGGCTAG |
| chr5 | 177238271 | 177238289 | 141 | GCACTAGATCGACCTCGG |
| chr5 | 177238276 | 177238294 | 142 | TCTGAGCACTAGATCGAC |
| chr5 | 177238281 | 177238299 | 143 | CTTGTTCTGAGCACTAGA |
| chr5 | 177238286 | 177238304 | 144 | ACCTGCTTGTTCTGAGCA |
| chr5 | 177238291 | 177238309 | 145 | CGTCCACCTGCTTGTTCT |
| chr5 | 177238296 | 177238314 | 146 | ATTCTCGTCCACCTGCTT |
| chr5 | 177238301 | 177238319 | 147 | AAAGAATTCTCGTCCACC |
| chr5 | 177238306 | 177238324 | 148 | AAATCAAAGAATTCTCGT |
| chr5 | 177238311 | 177238329 | 149 | GGTTGAAATCAAAGAATT |
| chr5 | 177238316 | 177238334 | 150 | TCTTTGGTTGAAATCAAA |
| chr5 | 177238321 | 177238339 | 151 | GCTCTTCTTTGGTTGAAA |
| chr5 | 177238326 | 177238344 | 152 | TGGAGGCTCTTCTTTGGT |
| chr5 | 177238331 | 177238349 | 153 | AGAACTGGAGGCTCTTCT |
| chr5 | 177238336 | 177238354 | 154 | TTTCAAGAACTGGAGGCT |
| chr5 | 177238341 | 177238359 | 155 | CTCCCTTTCAAGAACTGG |
| chr5 | 177238346 | 177238364 | 156 | GGAGCCTCCCTTTCAAGA |
| chr5 | 177238351 | 177238369 | 157 | AAAACGGAGCCTCCCTTT |
| chr5 | 177238356 | 177238374 | 158 | CTCCAAAAACGGAGCCTC |
| chr5 | 177238361 | 177238379 | 159 | GGGCCCTCCAAAAACGGA |
| chr5 | 177238366 | 177238384 | 160 | CCAAGGGGCCCTCCAAAA |
| chr5 | 177238374 | 177238392 | 161 | TGACTGAGCCAAGGGGCC |
| chr5 | 177238379 | 177238397 | 162 | AGTTCTGACTGAGCCAAG |
| chr5 | 177238384 | 177238402 | 163 | CTCCAAGTTCTGACTGAG |
| chr5 | 177238389 | 177238407 | 164 | TCCACCTCCAAGTTCTGA |
| chr5 | 177238394 | 177238412 | 165 | GCATGTCCACCTCCAAGT |
| chr5 | 177238399 | 177238417 | 166 | ACTCAGCATGTCCACCTC |
| chr5 | 177238404 | 177238422 | 167 | CGGCAACTCAGCATGTCC |
| chr5 | 177238409 | 177238427 | 168 | AGCTGCGGCAACTCAGCA |
| chr5 | 177238414 | 177238432 | 169 | AGGTCAGCTGCGGCAACT |
| chr5 | 177238419 | 177238437 | 170 | AGACAAGGTCAGCTGCGG |
| chr5 | 177238424 | 177238442 | 171 | GGCACAGACAAGGTCAGC |
| chr5 | 177238429 | 177238447 | 172 | CCACAGGCACAGACAAGG |
| chr5 | 177238434 | 177238452 | 173 | CGGAGCCACAGGCACAGA |
| chr5 | 177238439 | 177238457 | 174 | ACTTCCGGAGCCACAGGC |
| chr5 | 177238444 | 177238462 | 175 | GAGAGACTTCCGGAGCCA |
| chr5 | 177238449 | 177238467 | 176 | CCGTGGAGAGACTTCCGG |
| chr5 | 177238454 | 177238472 | 177 | GCAGGCCGTGGAGAGACT |
| chr5 | 177238459 | 177238477 | 178 | CAAGGGCAGGCCGTGGAG |
| chr5 | 177238464 | 177238482 | 179 | AGACTCAAGGGCAGGCCG |
| chr5 | 177238469 | 177238487 | 180 | TCCTCAGACTCAAGGGCA |
| chr5 | 177238474 | 177238492 | 181 | GCAATTCCTCAGACTCAA |
| chr5 | 177238479 | 177238497 | 182 | AACTAGCAATTCCTCAGA |
| chr5 | 177238484 | 177238502 | 183 | GTTTTAACTAGCAATTCC |
| chr5 | 177238487 | 177238505 | 184 | GGCGTTTTAACTAGCAAT |
| chr5 | 177238489 | 177238507 | 185 | CTGGCGTTTTAACTAGCA |
| chr5 | 177238492 | 177238510 | 186 | TACCTGGCGTTTTAACTA |
| chr5 | 177238497 | 177238515 | 187 | CACCTTACCTGGCGTTTT |
| chr5 | 177238502 | 177238520 | 188 | AACCCCACCTTACCTGGC |
| chr5 | 177238507 | 177238525 | 189 | ACCCCAACCCCACCTTAC |
| chr5 | 177238512 | 177238530 | 190 | CTGAGACCCCAACCCCAC |
| chr5 | 177238517 | 177238535 | 191 | AAATACTGAGACCCCAAC |
| chr5 | 177238522 | 177238540 | 192 | TGCTCAAATACTGAGACC |
| chr5 | 177238527 | 177238545 | 193 | ATATCTGCTCAAATACTG |
| chr5 | 177238532 | 177238550 | 194 | TAATCATATCTGCTCAAA |
| chr5 | 177238537 | 177238555 | 195 | TCCTCTAATCATATCTGC |
| chr5 | 177238542 | 177238560 | 196 | CTGCTTCCTCTAATCATA |
| chr5 | 177238547 | 177238565 | 197 | ATCTCCTGCTTCCTCTAA |
| chr5 | 177238552 | 177238570 | 198 | CTAAAATCTCCTGCTTCC |
| chr5 | 177238557 | 177238575 | 199 | ACATACTAAAATCTCCTG |
| chr5 | 177238562 | 177238580 | 200 | TCAAAACATACTAAAATC |
| chr5 | 177238567 | 177238585 | 201 | TTACATCAAAACATACTA |
| chr5 | 177238572 | 177238590 | 202 | TGGCTTTACATCAAAACA |
| chr5 | 177238577 | 177238595 | 203 | AATGTTGGCTTTACATCA |
| chr5 | 177238582 | 177238600 | 204 | GATACAATGTTGGCTTTA |
| chr5 | 177238587 | 177238605 | 205 | ATATAGATACAATGTTGG |
| chr5 | 177238592 | 177238610 | 206 | ATTGTATATAGATACAAT |
| chr5 | 177238597 | 177238615 | 207 | AGTTTATTGTATATAGAT |
| chr5 | 177238602 | 177238620 | 208 | GGGGTAGTTTATTGTATA |
| chr5 | 177238504 | 177238522 | 209 | CCAACCCCACCTTACCTG |
| chr5 | 177238538 | 177238556 | 210 | TTCCTCTAATCATATCTG |
| chr5 | 177238537 | 177238556 | 211 | TTCCTCTAATCATATCTGC |
| chr5 | 177238536 | 177238556 | 212 | TTCCTCTAATCATATCTGCT |
| chr5 | 177238538 | 177238558 | 213 | GCTTCCTCTAATCATATCTG |
| chr5 | 177238536 | 177238554 | 214 | CCTCTAATCATATCTGCT |
| chr5 | 177238535 | 177238555 | 215 | TCCTCTAATCATATCTGCTC |

TABLE 5G-1
Exemplary ASO Sequences

| | | | SEQ | |
|---|---|---|---|---|
| | | | ID | |
| chr | Start | End | NO: | ASO Sequence |
| chr5 | 177238123 | 177238141 | 216 | AACAAAGGCTACAAAAAGT |
| chr5 | 177238128 | 177238146 | 217 | AATTCTGACAAAGGCTACAA |
| chr5 | 177238133 | 177238151 | 218 | AATGAAATTCTGACAAAGGC |
| chr5 | 177238138 | 177238156 | 219 | AAGGAATGAAATTCTGACA |
| chr5 | 177238143 | 177238161 | 220 | AATTAAAAGGAATGAAATTC |
| chr5 | 177238148 | 177238166 | 221 | AACACTTTAAAAGGAATGA |
| chr5 | 177238153 | 177238171 | 222 | ATAACACACTTTAAAAGG |
| chr5 | 177238158 | 177238176 | 223 | AAAGAATAACACACTTTA |
| chr5 | 177238163 | 177238181 | 224 | AAGTCAAAAAGAATAACACA |
| chr5 | 177238168 | 177238186 | 225 | AATAAGTGTCAAAAAGAATA |
| chr5 | 177238173 | 177238191 | 226 | AATAATTTAAGTGTCAAAAA |
| chr5 | 177238178 | 177238196 | 227 | AATGTTGTAATTTAAGTGTC |
| chr5 | 177238183 | 177238201 | 228 | AAAATTGTTGTAATTTAA |
| chr5 | 177238188 | 177238206 | 229 | AAGGCCAAAATTGTTGTAA |
| chr5 | 177238193 | 177238211 | 230 | AATCCACAGGCCAAAATTGT |
| chr5 | 177238198 | 177238216 | 231 | AATAGAGTCCACAGGCCAAA |
| chr5 | 177238203 | 177238221 | 232 | AAAAATAGAGTCCACAGG |
| chr5 | 177238208 | 177238226 | 233 | AAAATAAAAATAGAGTCC |
| chr5 | 177238213 | 177238231 | 234 | AACAAAAAATAAAAATAG |
| chr5 | 177238218 | 177238236 | 235 | AACTAAGAACAAAAAATAAA |
| chr5 | 177238223 | 177238241 | 236 | AACTTACCTAAGAACAAAAA |
| chr5 | 177238228 | 177238246 | 237 | AAGGGAACTTACCTAAGAAC |
| chr5 | 177238233 | 177238251 | 238 | AACAGCGGGAACTTACCTA |
| chr5 | 177238236 | 177238254 | 239 | AATTCACAGCGGGAACTTAC |
| chr5 | 177238237 | 177238255 | 240 | AACTTCACAGCGGGAACTTA |
| chr5 | 177238241 | 177238259 | 241 | AATCCTCTTCACAGCGGGAA |
| chr5 | 177238246 | 177238264 | 242 | AAGGCTTTCCTCTTCACAGC |
| chr5 | 177238251 | 177238269 | 243 | AATAGAAGGCTTTCCTCTTC |
| chr5 | 177238256 | 177238274 | 244 | AACGGGCTAGAAGGCTTTCC |
| chr5 | 177238261 | 177238279 | 245 | AAGACCTCGGGCTAGAAGGC |
| chr5 | 177238266 | 177238284 | 246 | AAGATCGACCTCGGGCTAG |
| chr5 | 177238271 | 177238289 | 247 | AAGCACTAGATCGACCTCGG |
| chr5 | 177238276 | 177238294 | 248 | AATCTGAGCACTAGATCGAC |
| chr5 | 177238281 | 177238299 | 249 | AACTTGTTCTGAGCACTAGA |
| chr5 | 177238286 | 177238304 | 250 | AACCTGCTTGTTCTGAGCA |
| chr5 | 177238291 | 177238309 | 251 | AACGTCCACCTGCTTGTTCT |
| chr5 | 177238296 | 177238314 | 252 | AATTCTCGTCCACCTGCTT |
| chr5 | 177238301 | 177238319 | 253 | AAAGAATTCTCGTCCACC |
| chr5 | 177238306 | 177238324 | 254 | AAATCAAAGAATTCTCGT |
| chr5 | 177238311 | 177238329 | 255 | AAGGTTGAAATCAAAGAATT |
| chr5 | 177238316 | 177238334 | 256 | AATCTTTGGTTGAAATCAAA |
| chr5 | 177238321 | 177238339 | 257 | AAGCTCTTCTTTGGTTGAAA |
| chr5 | 177238326 | 177238344 | 258 | AATGGAGGCTCTTCTTTGGT |
| chr5 | 177238331 | 177238349 | 259 | AAGAACTGGAGGCTCTTCT |
| chr5 | 177238336 | 177238354 | 260 | AATTTCAAGAACTGGAGGCT |
| chr5 | 177238341 | 177238359 | 261 | AACTCCCTTTCAAGAACTGG |
| chr5 | 177238346 | 177238364 | 262 | AAGGAGCCTCCCTTTCAAGA |
| chr5 | 177238351 | 177238369 | 263 | AAAACGGAGCCTCCCTTT |
| chr5 | 177238356 | 177238374 | 264 | AACTCCAAAAACGGAGCCTC |
| chr5 | 177238361 | 177238379 | 265 | AAGGGCCCTCCAAAAACGGA |
| chr5 | 177238366 | 177238384 | 266 | AACCAAGGGGCCCTCCAAAA |
| chr5 | 177238374 | 177238392 | 267 | AATGACTGAGCCAAGGGGCC |
| chr5 | 177238379 | 177238397 | 268 | AAGTTCTGACTGAGCCAAG |
| chr5 | 177238384 | 177238402 | 269 | AACTCCAAGTTCTGACTGAG |
| chr5 | 177238389 | 177238407 | 270 | AATCCACCTCCAAGTTCTGA |
| chr5 | 177238394 | 177238412 | 271 | AAGCATGTCCACCTCCAAGT |
| chr5 | 177238399 | 177238417 | 272 | AACTCAGCATGTCCACCTC |
| chr5 | 177238404 | 177238422 | 273 | AACGGCAACTCAGCATGTCC |
| chr5 | 177238409 | 177238427 | 274 | AAGCTGCGGCAACTCAGCA |
| chr5 | 177238414 | 177238432 | 275 | AAGGTCAGCTGCGGCAACT |
| chr5 | 177238419 | 177238437 | 276 | AAGACAAGGTCAGCTGCGG |
| chr5 | 177238424 | 177238442 | 277 | AAGGCACAGACAAGGTCAGC |
| chr5 | 177238429 | 177238447 | 278 | AACCACAGGCACAGACAAGG |
| chr5 | 177238434 | 177238452 | 279 | AACGGAGCCACAGGCACAGA |
| chr5 | 177238439 | 177238457 | 280 | AACTTCCGGAGCCACAGGC |
| chr5 | 177238444 | 177238462 | 281 | AAGAGAGACTTCCGGAGCCA |
| chr5 | 177238449 | 177238467 | 282 | AACCGTGGAGAGACTTCCGG |
| chr5 | 177238454 | 177238472 | 283 | AAGCAGGCCGTGGAGAGACT |
| chr5 | 177238459 | 177238477 | 284 | AACAAGGGCAGGCCGTGGAG |
| chr5 | 177238464 | 177238482 | 285 | AAGACTCAAGGGCAGGCCG |
| chr5 | 177238469 | 177238487 | 286 | AATCCTCAGACTCAAGGGCA |
| chr5 | 177238474 | 177238492 | 287 | AAGCAATTCCTCAGACTCAA |
| chr5 | 177238479 | 177238497 | 288 | AACTAGCAATTCCTCAGA |
| chr5 | 177238484 | 177238502 | 289 | AAGTTTTAACTAGCAATTCC |
| chr5 | 177238487 | 177238505 | 290 | AAGGCGTTTTAACTAGCAAT |
| chr5 | 177238489 | 177238507 | 291 | AACTGGCGTTTTAACTAGCA |
| chr5 | 177238492 | 177238510 | 292 | AATACCTGGCGTTTTAACTA |
| chr5 | 177238497 | 177238515 | 293 | AACACCTTACCTGGCGTTTT |
| chr5 | 177238502 | 177238520 | 294 | AACCCCACCTTACCTGGC |
| chr5 | 177238507 | 177238525 | 295 | AACCCCAACCCCACCTTAC |
| chr5 | 177238512 | 177238530 | 296 | AACTGAGACCCCAACCCCAC |
| chr5 | 177238517 | 177238535 | 297 | AAATACTGAGACCCCAAC |
| chr5 | 177238522 | 177238540 | 298 | AATGCTCAAATACTGAGACC |
| chr5 | 177238527 | 177238545 | 299 | AATATCTGCTCAAATACTG |
| chr5 | 177238532 | 177238550 | 300 | AATAATCATATCTGCTCAAA |
| chr5 | 177238537 | 177238555 | 301 | AATCCTCTAATCATATCTGC |
| chr5 | 177238542 | 177238560 | 302 | AACTGCTTCCTCTAATCATA |
| chr5 | 177238547 | 177238565 | 303 | AATCTCCTGCTTCCTCTAA |
| chr5 | 177238552 | 177238570 | 304 | AACTAAAATCTCCTGCTTCC |
| chr5 | 177238557 | 177238575 | 305 | AACATACTAAAATCTCCTG |
| chr5 | 177238562 | 177238580 | 306 | AATCAAAACATACTAAAATC |
| chr5 | 177238567 | 177238585 | 307 | AATTACATCAAAACATACTA |
| chr5 | 177238572 | 177238590 | 308 | AATGGCTTTACATCAAAACA |
| chr5 | 177238577 | 177238595 | 309 | AATGTTGGCTTTACATCA |
| chr5 | 177238582 | 177238600 | 310 | AAGATACAATGTTGGCTTTA |
| chr5 | 177238587 | 177238605 | 311 | AATATAGATACAATGTTGG |
| chr5 | 177238592 | 177238610 | 312 | AATTGTATATAGATACAAT |
| chr5 | 177238597 | 177238615 | 313 | AAGTTTATTGTATATAGAT |
| chr5 | 177238602 | 177238620 | 314 | AAGGGGTAGTTTATTGTATA |
| chr5 | 177238504 | 177238522 | 315 | AACCAACCCCACCTTACCTG |
| chr5 | 177238538 | 177238556 | 316 | AATTCCTCTAATCATATCTG |
| chr5 | 177238537 | 177238556 | 317 | AATTCCTCTAATCATATCTGC |
| chr5 | 177238536 | 177238556 | 318 | AATTCCTCTAATCATATCTGCT |
| chr5 | 177238538 | 177238558 | 319 | AAGCTTCCTCTAATCATATCTG |
| chr5 | 177238536 | 177238554 | 320 | AACCTCTAATCATATCTGCT |
| chr5 | 177238535 | 177238555 | 321 | AATCCTCTAATCATATCTGCTC |

[0238] Alternative splicing events in PKD1, ABCA4, FUS, CEL, or NSD1 gene can lead to non-productive mRNA transcripts which in turn can lead to aberrant protein expression, and therapeutic agents which can target the alternative splicing events in PKD1, ABCA4, FUS, CEL, or NSD1 gene can modulate the expression level of functional proteins in DS patients and/or inhibit aberrant protein expression. Such therapeutic agents can be used to treat a condition caused by polycystin-1, ATP binding cassette subfamily A member 4, FUS RNA binding protein, carboxyl ester lipase, or nuclear receptor binding SET domain protein 1 protein deficiency.

[0239] One of the alternative splicing events that can lead to non-productive mRNA transcripts is the inclusion of an extra exon in the mRNA transcript that can induce non-sense mediated mRNA decay. The present disclosure provides compositions and methods for modulating alternative splicing of PKD1, ABCA4, FUS, CEL, or NSD1 to increase the production of protein-coding mature mRNA, and thus, translated functional polycystin-1, ATP binding cassette subfamily A member 4, FUS RNA binding protein, carboxyl ester lipase, or nuclear receptor binding SET domain protein 1 protein. These compositions and methods include antisense oligomers (ASOs) that can cause exon skipping, e.g., pseudoexon skipping, and promote constitutive splicing of PKD1, ABCA4, FUS, CEL, or NSD1 pre-mRNA. In various embodiments, functional polycystin-1, ATP binding cassette subfamily A member 4, FUS RNA binding protein, carboxyl ester lipase, or nuclear receptor binding SET domain protein 1 protein can be increased using the methods of the disclosure to treat a condition caused by polycystin-1, ATP binding cassette subfamily A member 4, FUS RNA binding protein, carboxyl ester lipase, or nuclear receptor binding SET domain protein 1 protein deficiency.

### Target Transcripts

[0240] In some embodiments, the methods of the present disclosure exploit the presence of ASCE in the pre-mRNA transcribed from PKD1, ABCA4, FUS, CEL, or NSD1 genes. Splicing of the identified PKD1, ABCA4, FUS, CEL, or NSD1 ASCE pre-mRNA species to produce functional mature PKD1, ABCA4, FUS, CEL, or NSD1 mRNA may be induced using a therapeutic agent such as an ASO that stimulates exon skipping of an ASCE. Induction of exon skipping may result in inhibition of an NMD pathway. The resulting mature PKD1, ABCA4, FUS, CEL, or NSD1 mRNA can be translated normally without activating NMD pathway, thereby increasing the amount of polycystin-1, ATP binding cassette subfamily A member 4, FUS RNA binding protein, carboxyl ester lipase, or nuclear receptor binding SET domain protein 1 protein in the patient's cells and alleviating symptoms of a condition or disease associated with polycystin-1, ATP binding cassette subfamily A member 4, FUS RNA binding protein, carboxyl ester lipase, or nuclear receptor binding SET domain protein 1 deficiency, such as Polycystic Kidney Disease 1 with or without Polycystic Liver Disease; Autosomal Dominant Polycystic Kidney Disease; Age-related macular degeneration-2; Stargardt Disease 1; Amyotrophic Lateral Sclerosis; Amyotrophic Lateral Sclerosis 6 with or without Frontotemporal Dementia; Tremor, Hereditary Essential, 4; Frontotemporal Dementia; Maturity-Onset Diabetes Of The Young, Type 8, with Exocrine Dysfunction; Maturity-Onset Diabetes Of The Young; Sotos Syndrome 1; or Beckwith-Wiedemann Syndrome.

[0241] In various embodiments, the present disclosure provides a therapeutic agent which can target PKD1, ABCA4, FUS, CEL, or NSD1 mRNA transcripts to modulate splicing or protein expression level. The therapeutic agent can be a small molecule, polynucleotide, or polypeptide. In some embodiments, the therapeutic agent is an ASO. Various regions or sequences on the PKD1, ABCA4, FUS, CEL, or NSD1 pre-mRNA can be targeted by a therapeutic agent, such as an ASO. In some embodiments, the ASO targets a PKD1, ABCA4, FUS, CEL, or NSD1 pre-mRNA transcript containing an ASCE. In some embodiments, the ASO targets a sequence within an ASCE of a PKD1, ABCA4, FUS, CEL, or NSD1 pre-mRNA transcript. In some embodiments, the ASO targets a sequence upstream (or 5′) from the 5′ end of an ASCE (3′ss) of a PKD1, ABCA4, FUS, CEL, or NSD1 pre-mRNA transcript. In some embodiments, the ASO targets a sequence downstream (or 3′) from the 3′ end of an ASCE (5′ss) of a PKD1, ABCA4, FUS, CEL, or NSD1 pre-mRNA transcript. In some embodiments, the ASO targets a sequence that is within an intron flanking on the 5′ end of the ASCE of a PKD1, ABCA4, FUS, CEL, or NSD1 pre-mRNA transcript. In some embodiments, the ASO targets a sequence that is within an intron flanking the 3′ end of the ASCE of a PKD1, ABCA4, FUS, CEL, or NSD1 pre-mRNA transcript. In some embodiments, the ASO targets a sequence comprising an ASCE-intron boundary of a PKD1, ABCA4, FUS, CEL, or NSD1 pre-mRNA transcript. An ASCE-intron boundary can refer to the junction of an intron sequence and an ASCE region. The intron sequence can flank the 5′ end of the ASCE, or the 3′ end of the ASCE. In some embodiments, the ASO targets a sequence within an exon of a PKD1, ABCA4, FUS, CEL, or NSD1 pre-mRNA transcript. In some embodiments, the ASO targets a sequence within an intron of a PKD1, ABCA4, FUS, CEL, or NSD1 pre-mRNA transcript. In some embodiments, the ASO targets a sequence comprising both a portion of an intron and a portion of an exon of a PKD1, ABCA4, FUS, CEL, or NSD1 pre-mRNA transcript.

[0242] In some embodiments, the ASO targets a sequence about 4 to about 300 nucleotides upstream (or 5′) from the 5′ end of the ASCE. In some embodiments, the ASO targets a sequence about 1 to about 20 nucleotides, about 20 to about 50 nucleotides, about 50 to about 100 nucleotides, about 100 to about 150 nucleotides, about 150 to about 200 nucleotides, about 200 to about 250 nucleotides, or about 250 to about 300 nucleotides upstream (or 5′) from the 5′ end of the ASCE region. In some embodiments, the ASO may target a sequence more than 300 nucleotides upstream from the 5′ end of the ASCE. In some embodiments, the ASO targets a sequence about 4 to about 300 nucleotides downstream (or 3′) from the 3′ end of the ASCE. In some embodiments, the ASO targets a sequence about 1 to about 20 nucleotides, about 20 to about 50 nucleotides, about 50 to about 100 nucleotides, about 100 to about 150 nucleotides, about 150 to about 200 nucleotides, about 200 to about 250 nucleotides, or about 250 to about 300 nucleotides downstream from the 3′ end of the ASCE. In some embodiments, the ASO targets a sequence more than 300 nucleotides downstream from the 3′ end of the ASCE.

[0243] In some embodiments, the PKD1, ABCA4, FUS, CEL, or NSD1 ASCE-containing pre-mRNA transcript is encoded by a genetic sequence with at least about 80%, 85%, 90%, 95%, 96%, 97%, 98%, 99% or 100% sequence identity to any one of SEQ ID NOS: 1-5. In some embodiments, the PKD1, ABCA4, FUS, CEL, or NSD1 ASCE pre-mRNA transcript comprises a sequence with at least about 80%, 85%, 90%, 95%, 96%, 97%, 98%, 99% or 100% sequence identity to any one of SEQ ID NOS: 6-10.

[0244] In some embodiments, the PKD1, ABCA4, FUS, CEL, or NSD1 ASCE-containing pre-mRNA transcript comprises a sequence with at least about 80%, 85%, 90%, 95%, 97%, or 100% sequence identity to any one of SEQ ID NOS: 6-10. In some embodiments, PKD1, ABCA4, FUS, CEL, or NSD1 ASCE-containing pre-mRNA transcript is encoded by a sequence with at least about 80%, 85%, 90%, 95%, 97%, or 100% sequence identity to any one of SEQ ID NOS: 1-5. In some embodiments, the targeted portion of the PKD1, ABCA4, FUS, CEL, or NSD1 ASCE-containing pre-mRNA comprises a sequence with at least 80%, 85%, 90%, 95%, 97%, or 100% sequence identity to a region comprising at least 8 contiguous nucleic acids of any one of SEQ ID NOS: 6-10.

[0245] In some embodiments, the ASO targets an intron upstream of the ASCE, an intron downstream of the ASCE, an exon upstream of the ASCE, an exon downstream of the ASCE or within the ASCE of ASCE-containing pre-mRNA. In some embodiments, the ASO targets an intron upstream of the ASCE, an intron downstream of the ASCE, an exon upstream of the ASCE, an exon downstream of the ASCE or within the ASCE of a PKD1, ABCA4, FUS, CEL or NSD1 ASCE-containing pre-mRNA.

[0246] In some embodiments, the ASO targets a sequence at least about 1500 nucleotides, about 1000 nucleotides, about 800 nucleotides, about 700 nucleotides, about 600 nucleotides, about 500 nucleotides, about 400 nucleotides, about 300 nucleotides, about 200 nucleotides, about 100 nucleotides, about 80 nucleotides, about 70 nucleotides, about 60 nucleotides, about 50 nucleotides upstream (or 5′) from the 5′ end of the ASCE. In some embodiments, the ASO targets a sequence at most about 1500 nucleotides, about 1000 nucleotides, about 800 nucleotides, about 700 nucleotides, about 600 nucleotides, about 500 nucleotides, about 400 nucleotides, about 300 nucleotides, about 200 nucleotides, about 100 nucleotides, about 80 nucleotides, about 70 nucleotides, about 60 nucleotides, about 50 nucleotides upstream (or 5′) from the 5′ end of the ASCE. In some embodiments, the ASO targets a sequence at about 1500 nucleotides, about 1000 nucleotides, about 800 nucleotides, about 700 nucleotides, about 600 nucleotides, about 500 nucleotides, about 400 nucleotides, about 300 nucleotides, about 200 nucleotides, about 100 nucleotides, about 80 nucleotides, about 70 nucleotides, about 60 nucleotides, about 50 nucleotides upstream (or 5′) from the 5′ end of the ASCE.

[0247] In some embodiments, the ASO targets a sequence at least about 1500 nucleotides, about 1000 nucleotides, about 800 nucleotides, about 700 nucleotides, about 600 nucleotides, about 500 nucleotides, about 400 nucleotides, about 300 nucleotides, about 200 nucleotides, about 100 nucleotides, about 80 nucleotides, about 70 nucleotides, about 60 nucleotides, about 50 nucleotides downstream (or 3′) from the 3′ end of the ASCE. In some embodiments, the ASO targets a sequence at most about 1500 nucleotides, about 1000 nucleotides, about 800 nucleotides, about 700 nucleotides, about 600 nucleotides, about 500 nucleotides, about 400 nucleotides, about 300 nucleotides, about 200 nucleotides, about 100 nucleotides, about 80 nucleotides, about 70 nucleotides, about 60 nucleotides, about 50 nucleotides downstream (or 3′) from the 3′ end of the ASCE. In some embodiments, the ASO targets a sequence about 1500 nucleotides, about 1000 nucleotides, about 800 nucleotides, about 700 nucleotides, about 600 nucleotides, about 500 nucleotides, about 400 nucleotides, about 300 nucleotides, about 200 nucleotides, about 100 nucleotides, about 80 nucleotides, about 70 nucleotides, about 60 nucleotides, about 50 nucleotides downstream (or 3′) from the 3′ end of the ASCE.

[0248] In some embodiments, the ASO targets a PKD1 ASCE-containing pre-mRNA, wherein the ASCE is exon 38 of PKD1. In some embodiments, the ASO targets a PKD1 ASCE-containing pre-mRNA, wherein the ASCE is exon GRCh38/hg38: chr16 2092954 2093093 of PKD1. In some embodiments, the ASO targets a PKD1 ASCE-containing pre-mRNA, wherein the ASCE comprises a sequence with at least about 80%, 85%, 90%, 95%, 97%, or 100% sequence identity to SEQ ID NO: 11. In some embodiments, the ASO targets an intron upstream of the ASCE, an intron downstream of the ASCE, an exon upstream of the ASCE, an exon downstream of the ASCE or within the ASCE of a PKD1 ASCE-containing pre-mRNA. In some embodiments, the ASO targets a sequence at most about 1500 nucleotides, about 1000 nucleotides, about 800 nucleotides, about 700 nucleotides, about 600 nucleotides, about 500 nucleotides, about 400 nucleotides, about 300 nucleotides, about 200 nucleotides, about 100 nucleotides, about 80 nucleotides, about 70 nucleotides, about 60 nucleotides, about 50 nucleotides upstream (or 5′) from GRCh38/hg38: chr16 2092954 of PKD1. In some embodiments, the ASO targets a sequence at least about 1500 nucleotides, about 1000 nucleotides, about 800 nucleotides, about 700 nucleotides, about 600 nucleotides, about 500 nucleotides, about 400 nucleotides, about 300 nucleotides, about 200 nucleotides, about 100 nucleotides, about 80 nucleotides, about 70 nucleotides, about 60 nucleotides, about 50 nucleotides downstream (or 3′) from GRCh38/hg38: chr16 2093093 of PKD1. In some embodiments, the ASO targets a sequence within GRCh38/hg38: chr16 2092954 2093093 of PKD1.

[0249] In some embodiments, the ASO targets a ABCA4 ASCE-containing pre-mRNA, wherein the ASCE is exon 3 of ABCA4. In some embodiments, the ASO targets a ABCA4 ASCE-containing pre-mRNA, wherein the ASCE is exon GRCh38/hg38: chr1 94111438 94111579 of ABCA4. In some embodiments, the ASO targets a ABCA4 ASCE-containing pre-mRNA, wherein the ASCE comprises a sequence with at least about 80%, 85%, 90%, 95%, 97%, or 100% sequence identity to SEQ ID NO: 12. In some embodiments, the ASO targets an intron upstream of the ASCE, an intron downstream of the ASCE, an exon upstream of the ASCE, an exon downstream of the ASCE or within the ASCE of a ABCA4 ASCE-containing pre-mRNA. In some embodiments, the ASO targets a sequence at most about 1500 nucleotides, about 1000 nucleotides, about 800 nucleotides, about 700 nucleotides, about 600 nucleotides, about 500 nucleotides, about 400 nucleotides, about 300 nucleotides, about 200 nucleotides, about 100 nucleotides, about 80 nucleotides, about 70 nucleotides, about 60 nucleotides, about 50 nucleotides upstream (or 5′) from GRCh38/hg38: chr1 94111438 of ABCA4. In some embodiments, the ASO targets a sequence at least about 1500 nucleotides, about 1000 nucleotides, about 800 nucleotides, about 700 nucleotides, about 600 nucleotides, about 500 nucleotides, about 400 nucleotides, about 300 nucleotides, about 200 nucleotides, about 100 nucleotides, about 80 nucleotides, about 70 nucleotides, about 60 nucleotides, about 50 nucleotides downstream (or 3′) from GRCh38/hg38: chr1 94111579 of ABCA4. In some embodiments, the ASO targets a sequence within GRCh38/hg38: chr1 94111438 94111579 of ABCA4.

[0250] In some embodiments, the ASO targets a FUS ASCE-containing pre-mRNA, wherein the ASCE is exon 7 of FUS. In some embodiments, the ASO targets a FUS ASCE-containing pre-mRNA, wherein the ASCE is exon GRCh38/hg38: chr16 31186802 31186836 of FUS. In some embodiments, the ASO targets a FUS ASCE-containing pre-mRNA, wherein the ASCE comprises a sequence with at least about 80%, 85%, 90%, 95%, 97%, or 100% sequence identity to SEQ ID NO: 13. In some embodiments, the ASO targets an intron upstream of the ASCE, an intron downstream of the ASCE, an exon upstream of the ASCE, an exon downstream of the ASCE or within the ASCE of a FUS ASCE-containing pre-mRNA. In some embodiments, the ASO targets a sequence at most about 1500 nucleotides, about 1000 nucleotides, about 800 nucleotides, about 700 nucleotides, about 600 nucleotides, about 500 nucleotides, about 400 nucleotides, about 300 nucleotides, about 200 nucleotides, about 100 nucleotides, about 80 nucleotides, about 70 nucleotides, about 60 nucleotides, about 50 nucleotides upstream (or 5′) from GRCh38/hg38: chr16 31186802 of FUS. In some embodiments, the ASO targets a sequence at least about 1500 nucleotides, about 1000 nucleotides, about 800 nucleotides, about 700 nucleotides, about 600 nucleotides, about 500 nucleotides, about 400 nucleotides, about 300 nucleotides, about 200 nucleotides, about 100 nucleotides, about 80 nucleotides, about 70 nucleotides, about 60 nucleotides, about 50 nucleotides downstream (or 3′) from GRCh38/hg38: chr16 31186836 of FUS. In some embodiments, the ASO targets a sequence within GRCh38/hg38: chr16 31186802 31186836 of FUS.

[0251] In some embodiments, the ASO targets a CEL ASCE-containing pre-mRNA, wherein the ASCE is exon 5 of CEL. In some embodiments, the ASO targets a CEL ASCE-containing pre-mRNA, wherein the ASCE is exon GRCh38/hg38: chr9 133066530 133066660 of CEL. In some embodiments, the ASO targets a CEL ASCE-containing pre-mRNA, wherein the ASCE comprises a sequence with at least about 80%, 85%, 90%, 95%, 97%, or 100% sequence identity to SEQ ID NO: 14. In some embodiments, the ASO targets an intron upstream of the ASCE, an intron downstream of the ASCE, an exon upstream of the ASCE, an exon downstream of the ASCE or within the ASCE of a CEL ASCE-containing pre-mRNA. In some embodiments, the ASO targets a sequence at most about 1500 nucleotides, about 1000 nucleotides, about 800 nucleotides, about 700 nucleotides, about 600 nucleotides, about 500 nucleotides, about 400 nucleotides, about 300 nucleotides, about 200 nucleotides, about 100 nucleotides, about 80 nucleotides, about 70 nucleotides, about 60 nucleotides, about 50 nucleotides upstream (or 5′) from GRCh38/hg38: chr9 133066530 of CEL. In some embodiments, the ASO targets a sequence at least about 1500 nucleotides, about 1000 nucleotides, about 800 nucleotides, about 700 nucleotides, about 600 nucleotides, about 500 nucleotides, about 400 nucleotides, about 300 nucleotides, about 200 nucleotides, about 100 nucleotides, about 80 nucleotides, about 70 nucleotides, about 60 nucleotides, about 50 nucleotides downstream (or 3′) from GRCh38/hg38: chr9 133066660 of CEL. In some embodiments, the ASO targets a sequence within GRCh38/hg38: chr9 133066530 133066660 of CEL.

[0252] In some embodiments, the ASO targets a NSD1 ASCE-containing pre-mRNA, wherein the ASCE is exon 8 of NSD1. In some embodiments, the ASO targets a NSD1 ASCE-containing pre-mRNA, wherein the ASCE is exon GRCh38/hg38: chr5 177238237 177238507 of NSD1. In some embodiments, the ASO targets a NSD1 ASCE-containing pre-mRNA, wherein the ASCE comprises a sequence with at least about 80%, 85%, 90%, 95%, 97%, or 100% sequence identity to SEQ ID NO: 15. In some embodiments, the ASO targets an intron upstream of the ASCE, an intron downstream of the ASCE, an exon upstream of the ASCE, an exon downstream of the ASCE or within the ASCE of a NSD1 ASCE-containing pre-mRNA. In some embodiments, the ASO targets a sequence at most about 1500 nucleotides, about 1000 nucleotides, about 800 nucleotides, about 700 nucleotides, about 600 nucleotides, about 500 nucleotides, about 400 nucleotides, about 300 nucleotides, about 200 nucleotides, about 100 nucleotides, about 80 nucleotides, about 70 nucleotides, about 60 nucleotides, about 50 nucleotides upstream (or 5′) from GRCh38/hg38: chr5 177238237 of NSD1. In some embodiments, the ASO targets a sequence at least about 1500 nucleotides, about 1000 nucleotides, about 800 nucleotides, about 700 nucleotides, about 600 nucleotides, about 500 nucleotides, about 400 nucleotides, about 300 nucleotides, about 200 nucleotides, about 100 nucleotides, about 80 nucleotides, about 70 nucleotides, about 60 nucleotides, about 50 nucleotides downstream (or 3′) from GRCh38/hg38: chr5 177238507 of NSD. In some embodiments, the ASO targets a sequence within GRCh38/hg38: chr5 177238237 177238507 of NSD1.

[0253] In some embodiments, the ASO comprises a sequence complementary to the targeted portion of the ASCE-containing pre-mRNA encoded by a gene having a sequence with at least about 80%, 85%, 90%, 95%, 97%, or 100% sequence identity to any one of SEQ ID NOS: 1-5. In some embodiments, the ASO comprises a sequence complementary to the targeted portion of the ASCE-containing pre-mRNA having a sequence with at least about 80%, 85%, 90%, 95%, 97%, or 100% sequence identity to any one of SEQ ID NOS: 6-10. In some embodiments, the ASO comprises a sequence complementary to the targeted portion of the ASCE having a sequence with at least about 80%, 85%, 90%, 95%, 97%, or 100% sequence identity to any one of SEQ ID NOS: 11-15. In some embodiments, the ASO comprises a sequence with at least about 80%, 85%, 90%, 95%, 97%, or 100% sequence identity to any one of SEQ ID NOS: 16-309. In some embodiments, the ASO comprises a sequence with at least about 80%, 85%, 90%, 95%, 97%, or 100% sequence identity to the reverse complement sequence of any one of SEQ ID NOS: 16-309. In some embodiments, the ASO comprises a sequence with at least about 80%, 85%, 90%, 95%, 97%, or 100% sequence identity to the complement sequence of any one of SEQ ID NOS: 16-309. In some embodiments, the ASO comprises a sequence with at least about 80%, 85%, 90%, 95%, 97%, or 100% sequence identity to a sequence of any one of SEQ ID NOS: 16-309 in which each T is U.

[0254] In some embodiments, the ASO targets a sequence upstream from the 5′ end of an ASCE.

[0255] In some embodiments, the ASOs target a sequence containing an exon-intron boundary (or junction). In some embodiments, the ASOs do not target a sequence containing an exon-intron boundary (or junction). In some embodiments, the ASOs target a sequence downstream from the 3′ end of an ASCE. In some embodiments, ASOs target a sequence within an ASCE.

### Protein Expression

[0256] In some embodiments, the methods described herein are used to increase the production of a functional polycystin-1, ATP binding cassette subfamily A member 4, FUS RNA binding protein, carboxyl ester lipase, or nuclear receptor binding SET domain protein 1 protein or RNA. As used herein, the term “functional” refers to the amount of activity or function of a polycystin-1, ATP binding cassette subfamily A member 4, FUS RNA binding protein, carboxyl ester lipase, or nuclear receptor binding SET domain protein 1 protein or RNA that is necessary to eliminate any one or more symptoms of a treated condition or disease, e.g., Polycystic Kidney Disease 1 with or without Polycystic Liver Disease; Autosomal Dominant Polycystic Kidney Disease; Age-related macular degeneration-2; Stargardt Disease 1; Amyotrophic Lateral Sclerosis; Amyotrophic Lateral Sclerosis 6 with or without Frontotemporal Dementia; Tremor, Hereditary Essential, 4; Frontotemporal Dementia; Maturity-Onset Diabetes Of The Young, Type 8, with Exocrine Dysfunction; Maturity-Onset Diabetes Of The Young; Sotos Syndrome 1; or Beckwith-Wiedemann Syndrome. In some embodiments, the methods are used to increase the production of a partially functional polycystin-1, ATP binding cassette subfamily A member 4, FUS RNA binding protein, carboxyl ester lipase, or nuclear receptor binding SET domain protein 1 protein or RNA. As used herein, the term “partially functional” refers to any amount of activity or function of the polycystin-1, ATP binding cassette subfamily A member 4, FUS RNA binding protein, carboxyl ester lipase, or nuclear receptor binding SET domain protein 1 protein or RNA that is less than the amount of activity or function that is necessary to eliminate or prevent any one or more symptoms of a disease or condition. In some embodiments, a partially functional protein or RNA will have at least 10%, at least 20%, at least 30%, at least 40%, at least 50%, at least 60%, at least 70%, at least 75%, at least 80%, at least 85%, at least 90%, or at least 95% less activity relative to the fully functional protein or RNA.

[0257] In some embodiments, the method is a method of increasing the expression of the polycystin-1, ATP binding cassette subfamily A member 4, FUS RNA binding protein, carboxyl ester lipase, or nuclear receptor binding SET domain protein 1 protein by cells of a subject having a ASCE-containing pre-mRNA encoding the polycystin-1, ATP binding cassette subfamily A member 4, FUS RNA binding protein, carboxyl ester lipase, or nuclear receptor binding SET domain protein 1 protein, wherein the subject has Polycystic Kidney Disease 1 with or without Polycystic Liver Disease; Autosomal Dominant Polycystic Kidney Disease; Age-related macular degeneration-2; Stargardt Disease 1; Amyotrophic Lateral Sclerosis; Amyotrophic Lateral Sclerosis 6 with or without Frontotemporal Dementia; Tremor, Hereditary Essential, 4; Frontotemporal Dementia; Maturity-Onset Diabetes Of The Young, Type 8, with Exocrine Dysfunction; Maturity-Onset Diabetes Of The Young; Sotos Syndrome 1; or Beckwith-Wiedemann Syndrome caused by a deficient amount of activity of polycystin-1, ATP binding cassette subfamily A member 4, FUS RNA binding protein, carboxyl ester lipase, or nuclear receptor binding SET domain protein 1 protein, and wherein the deficient amount of the polycystin-1, ATP binding cassette subfamily A member 4, FUS RNA binding protein, carboxyl ester lipase, or nuclear receptor binding SET domain protein 1 protein is caused by haploinsufficiency of the polycystin-1, ATP binding cassette subfamily A member 4, FUS RNA binding protein, carboxyl ester lipase, or nuclear receptor binding SET domain protein 1 protein. In such an embodiment, the subject has a first allele encoding a functional polycystin-1, ATP binding cassette subfamily A member 4, FUS RNA binding protein, carboxyl ester lipase, or nuclear receptor binding SET domain protein 1 protein, and a second allele from which the polycystin-1, ATP binding cassette subfamily A member 4, FUS RNA binding protein, carboxyl ester lipase, or nuclear receptor binding SET domain protein 1 protein is not produced. In another such embodiment, the subject has a first allele encoding a functional polycystin-1, ATP binding cassette subfamily A member 4, FUS RNA binding protein, carboxyl ester lipase, or nuclear receptor binding SET domain protein 1 protein, and a second allele encoding a nonfunctional polycystin-1, ATP binding cassette subfamily A member 4, FUS RNA binding protein, carboxyl ester lipase, or nuclear receptor binding SET domain protein 1 protein. In another such embodiment, the subject has a first allele encoding a functional polycystin-1, ATP binding cassette subfamily A member 4, FUS RNA binding protein, carboxyl ester lipase, or nuclear receptor binding SET domain protein 1 protein, and a second allele encoding a partially functional polycystin-1, ATP binding cassette subfamily A member 4, FUS RNA binding protein, carboxyl ester lipase, or nuclear receptor binding SET domain protein 1 protein. In any of these embodiments, the antisense oligomer binds to a targeted portion of the ASCE-containing pre-mRNA transcribed from the second allele, thereby inhibiting or reducing exon skipping of the ASCE from the pre-mRNA or promoting inclusion of the ASCE in a mature RNA processed from the ASCE-containing pre-mRNA, and causing an increase in the level of mature mRNA encoding functional polycystin-1, ATP binding cassette subfamily A member 4, FUS RNA binding protein, carboxyl ester lipase, or nuclear receptor binding SET domain protein 1 protein, and an increase in the expression of the polycystin-1, ATP binding cassette subfamily A member 4, FUS RNA binding protein, carboxyl ester lipase, or nuclear receptor binding SET domain protein 1 protein in the cells of the subject.

[0258] In some embodiments, the method is a method of increasing the expression of the polycystin-1, ATP binding cassette subfamily A member 4, FUS RNA binding protein, carboxyl ester lipase, or nuclear receptor binding SET domain protein 1 protein by cells of a subject having a ASCE-containing pre-mRNA encoding the polycystin-1, ATP binding cassette subfamily A member 4, FUS RNA binding protein, carboxyl ester lipase, or nuclear receptor binding SET domain protein 1 protein, wherein the subject has Polycystic Kidney Disease 1 with or without Polycystic Liver Disease; Autosomal Dominant Polycystic Kidney Disease; Age-related macular degeneration-2; Stargardt Disease 1; Amyotrophic Lateral Sclerosis; Amyotrophic Lateral Sclerosis 6 with or without Frontotemporal Dementia; Tremor, Hereditary Essential, 4; Frontotemporal Dementia; Maturity-Onset Diabetes Of The Young, Type 8, with Exocrine Dysfunction; Maturity-Onset Diabetes Of The Young; Sotos Syndrome 1; or Beckwith-Wiedemann Syndrome caused by a deficient amount of activity of polycystin-1, ATP binding cassette subfamily A member 4, FUS RNA binding protein, carboxyl ester lipase, or nuclear receptor binding SET domain protein 1 protein, and wherein the deficient amount of the polycystin-1, ATP binding cassette subfamily A member 4, FUS RNA binding protein, carboxyl ester lipase, or nuclear receptor binding SET domain protein 1 protein is caused by autosomal recessive inheritance.

[0259] In some embodiments, the method is a method of increasing the expression of the polycystin-1, ATP binding cassette subfamily A member 4, FUS RNA binding protein, carboxyl ester lipase, or nuclear receptor binding SET domain protein 1 protein by cells of a subject having a ASCE-containing pre-mRNA encoding the polycystin-1, ATP binding cassette subfamily A member 4, FUS RNA binding protein, carboxyl ester lipase, or nuclear receptor binding SET domain protein 1 protein, wherein the subject has Polycystic Kidney Disease 1 with or without Polycystic Liver Disease; Autosomal Dominant Polycystic Kidney Disease; Age-related macular degeneration-2; Stargardt Disease 1; Amyotrophic Lateral Sclerosis; Amyotrophic Lateral Sclerosis 6 with or without Frontotemporal Dementia; Tremor, Hereditary Essential, 4; Frontotemporal Dementia; Maturity-Onset Diabetes Of The Young, Type 8, with Exocrine Dysfunction; Maturity-Onset Diabetes Of The Young; Sotos Syndrome 1; or Beckwith-Wiedemann Syndrome caused by a deficient amount of activity of polycystin-1, ATP binding cassette subfamily A member 4, FUS RNA binding protein, carboxyl ester lipase, or nuclear receptor binding SET domain protein 1 protein, and wherein the deficient amount of the polycystin-1, ATP binding cassette subfamily A member 4, FUS RNA binding protein, carboxyl ester lipase, or nuclear receptor binding SET domain protein 1 protein is caused by autosomal dominant inheritance.

[0260] In some embodiments, the method is a method of increasing the expression of the polycystin-1, ATP binding cassette subfamily A member 4, FUS RNA binding protein, carboxyl ester lipase, or nuclear receptor binding SET domain protein 1 protein by cells of a subject having a ASCE-containing pre-mRNA encoding the polycystin-1, ATP binding cassette subfamily A member 4, FUS RNA binding protein, carboxyl ester lipase, or nuclear receptor binding SET domain protein 1 protein, wherein the subject has Polycystic Kidney Disease 1 with or without Polycystic Liver Disease; Autosomal Dominant Polycystic Kidney Disease; Age-related macular degeneration-2; Stargardt Disease 1; Amyotrophic Lateral Sclerosis; Amyotrophic Lateral Sclerosis 6 with or without Frontotemporal Dementia; Tremor, Hereditary Essential, 4; Frontotemporal Dementia; Maturity-Onset Diabetes Of The Young, Type 8, with Exocrine Dysfunction; Maturity-Onset Diabetes Of The Young; Sotos Syndrome 1; or Beckwith-Wiedemann Syndrome caused by a deficient amount of activity of polycystin-1, ATP binding cassette subfamily A member 4, FUS RNA binding protein, carboxyl ester lipase, or nuclear receptor binding SET domain protein 1 protein, and wherein the deficient amount of the polycystin-1, ATP binding cassette subfamily A member 4, FUS RNA binding protein, carboxyl ester lipase, or nuclear receptor binding SET domain protein 1 protein is caused by X-linked dominant inheritance.

[0261] In related embodiments, the method is a method of using an ASO to increase the expression of a protein or functional RNA. In some embodiments, an ASO may be used to increase the expression of polycystin-1, ATP binding cassette subfamily A member 4, FUS RNA binding protein, carboxyl ester lipase, or nuclear receptor binding SET domain protein 1 protein in cells of a subject having a ASCE-containing pre-mRNA encoding polycystin-1, ATP binding cassette subfamily A member 4, FUS RNA binding protein, carboxyl ester lipase, or nuclear receptor binding SET domain protein 1 protein, wherein the subject has a deficiency, e.g., Polycystic Kidney Disease 1 with or without Polycystic Liver Disease; Autosomal Dominant Polycystic Kidney Disease; Age-related macular degeneration-2; Stargardt Disease 1; Amyotrophic Lateral Sclerosis; Amyotrophic Lateral Sclerosis 6 with or without Frontotemporal Dementia; Tremor, Hereditary Essential, 4; Frontotemporal Dementia; Maturity-Onset Diabetes Of The Young, Type 8, with Exocrine Dysfunction; Maturity-Onset Diabetes Of The Young; Sotos Syndrome 1; or Beckwith-Wiedemann Syndrome, in the amount or function of a polycystin-1, ATP binding cassette subfamily A member 4, FUS RNA binding protein, carboxyl ester lipase, or nuclear receptor binding SET domain protein 1 protein.

[0262] In some embodiments, the ASCE-containing pre-mRNA transcript that encodes the protein that is causative of the disease or condition is targeted by the ASOs described herein. In some embodiments, a ASCE-containing pre-mRNA transcript that encodes a protein that is not causative of the disease is targeted by the ASOs. For example, a disease that is the result of a mutation or deficiency of a first protein in a particular pathway may be ameliorated by targeting a ASCE-containing pre-mRNA that encodes a second protein, thereby increasing production of the second protein. In some embodiments, the function of the second protein is able to compensate for the mutation or deficiency of the first protein (which is causative of the disease or condition).

[0263] In some embodiments, the subject has:
[0264] (a) a first mutant allele from which
   [0265] (i) the polycystin-1, ATP binding cassette subfamily A member 4, FUS RNA binding protein, carboxyl ester lipase, or nuclear receptor binding SET domain protein 1 protein is produced at a reduced level compared to production from a wild-type allele,
   [0266] (ii) the polycystin-1, ATP binding cassette subfamily A member 4, FUS RNA binding protein, carboxyl ester lipase, or nuclear receptor binding SET domain protein 1 protein is produced in a form having reduced function compared to an equivalent wild-type protein, or
   [0267] (iii) the polycystin-1, ATP binding cassette subfamily A member 4, FUS RNA binding protein, carboxyl ester lipase, or nuclear receptor binding SET domain protein 1 protein or functional RNA is not produced; and
[0268] (b) a second mutant allele from which
   [0269] (i) the polycystin-1, ATP binding cassette subfamily A member 4, FUS RNA binding protein, carboxyl ester lipase, or nuclear receptor binding SET domain protein 1 protein is produced at a reduced level compared to production from a wild-type allele,
   [0270] (ii) the polycystin-1, ATP binding cassette subfamily A member 4, FUS RNA binding protein, carboxyl ester lipase, or nuclear receptor binding SET domain protein 1 protein is produced in a form having reduced function compared to an equivalent wild-type protein, or
   [0271] (iii) the polycystin-1, ATP binding cassette subfamily A member 4, FUS RNA binding protein, carboxyl ester lipase, or nuclear receptor binding SET domain protein 1 protein is not produced, and

[0272] wherein the ASCE-containing pre-mRNA is transcribed from the first allele and/or the second allele. In these embodiments, the ASO binds to a targeted portion of the ASCE-containing pre-mRNA transcribed from the first allele or the second allele, thereby promoting exon inclusion of the ASCE in a processed mRNA processed from the ASCE-containing pre-mRNA, and causing an increase in the level of mRNA encoding polycystin-1, ATP binding cassette subfamily A member 4, FUS RNA binding protein, carboxyl ester lipase, or nuclear receptor binding SET domain protein 1 protein and an increase in the expression of the target protein or functional RNA in the cells of the subject. In these embodiments, the target protein or functional RNA having an increase in expression level resulting from the reduction or inhibition of exon skipping of the ASCE from the ASCE-containing pre-mRNA may be either in a form having reduced function compared to the equivalent wild-type protein (partially functional), or having full function compared to the equivalent wild-type protein (fully functional).

[0273] In some embodiments, the level of mRNA encoding polycystin-1, ATP binding cassette subfamily A member 4, FUS RNA binding protein, carboxyl ester lipase, or nuclear receptor binding SET domain protein 1 protein is increased 1.1 to 10-fold, when compared to the amount of mRNA encoding polycystin-1, ATP binding cassette subfamily A member 4, FUS RNA binding protein, carboxyl ester lipase, or nuclear receptor binding SET domain protein 1 protein that is produced in a control cell, e.g., one that is not treated with the antisense oligomer or one that is treated with an antisense oligomer that does not bind to the targeted portion of the PKD1, ABCA4, FUS, CEL, or NSD1 ASCE-containing pre-mRNA.

[0274] In some embodiments, a subject treated using the methods of the present disclosure expresses a partially functional polycystin-1, ATP binding cassette subfamily A member 4, FUS RNA binding protein, carboxyl ester lipase, or nuclear receptor binding SET domain protein 1 protein from one allele, wherein the partially functional polycystin-1, ATP binding cassette subfamily A member 4, FUS RNA binding protein, carboxyl ester lipase, or nuclear receptor binding SET domain protein 1 protein may be caused by a frameshift mutation, a nonsense mutation, a missense mutation, or a partial gene deletion. In some embodiments, a subject treated using the methods of the disclosure expresses a nonfunctional polycystin-1, ATP binding cassette subfamily A member 4, FUS RNA binding protein, carboxyl ester lipase, or nuclear receptor binding SET domain protein 1 protein from one allele, wherein the nonfunctional polycystin-1, ATP binding cassette subfamily A member 4, FUS RNA binding protein, carboxyl ester lipase, or nuclear receptor binding SET domain protein 1 protein may be caused by a frameshift mutation, a nonsense mutation, a missense mutation, a partial gene deletion, in one allele. In some embodiments, a subject treated using the methods of the disclosure has a PKD1, ABCA4, FUS, CEL, or NSD1 whole gene deletion, in one allele.

### Exon Inclusion

[0275] As used herein, an “ASCE-containing pre-mRNA” is a pre-mRNA transcript that contains at least one alternatively-spliced coding exon. Alternative or aberrant splicing can result in exclusion of the at least one ASC in the mature mRNA transcripts. The terms “mature mRNA,” and “fully spliced mRNA,” are used interchangeably herein to describe a fully processed mRNA. Inclusion of the at least one pseudo-exon can be non-productive mRNA and lead to NMD of the mature mRNA. ASCE-containing mature mRNA may sometimes lead to aberrant protein expression.

[0276] In some embodiments, the included pseudo-exon is the most abundant pseudo-exon in a population of ASCE-containing pre-mRNAs transcribed from the gene encoding the target protein in a cell. In some embodiments, the included pseudo-exon is the most abundant pseudo-exon in a population of ASCE-containing pre-mRNAs transcribed from the gene encoding the target protein in a cell, wherein the population of ASCE-containing pre-mRNAs comprises two or more included pseudo-exons. In some embodiments, an antisense oligomer targeted to the most abundant pseudo-exon in the population of ASCE-containing pre-mRNAs encoding the target protein induces exon skipping of one or two or more pseudo-exons in the population, including the pseudo-exon to which the antisense oligomer is targeted or binds. In some embodiments, the targeted region is in a pseudo-exon that is the most abundant pseudo-exon in an ASCE-containing pre-mRNA encoding the polycystin-1, ATP binding cassette subfamily A member 4, FUS RNA binding protein, carboxyl ester lipase, or nuclear receptor binding SET domain protein 1 protein.

[0277] The degree of exon inclusion can be expressed as percent exon inclusion, e.g., the percentage of transcripts in which a given pseudo-exon is included. In brief, percent exon inclusion can be calculated as the percentage of the amount of RNA transcripts with the exon inclusion, over the sum of the average of the amount of RNA transcripts with exon inclusion plus the average of the amount of RNA transcripts with exon exclusion.

[0278] In some embodiments, an ASCE is an exon that is identified as an ASCE based on a determination of at least about 5%, at least about 10%, at least about 15%, at least about 20%, at least about 25%, at least about 30%, at least about 35%, at least about 40%, at least about 45%, or at least about 50%, exclusion. In embodiments, an ASCE is an exon that is identified as an ASCE based on a determination of about 5% to about 100%, about 5% to about 95%, about 5% to about 90%, about 5% to about 85%, about 5% to about 80%, about 5% to about 75%, about 5% to about 70%, about 5% to about 65%, about 5% to about 60%, about 5% to about 55%, about 5% to about 50%, about 5% to about 45%, about 5% to about 40%, about 5% to about 35%, about 5% to about 30%, about 5% to about 25%, about 5% to about 20%, about 5% to about 15%, about 10% to about 100%, about 10% to about 95%, about 10% to about 90%, about 10% to about 85%, about 10% to about 80%, about 10% to about 75%, about 10% to about 70%, about 10% to about 65%, about 10% to about 60%, about 10% to about 55%, about 10% to about 50%, about 10% to about 45%, about 10% to about 40%, about 10% to about 35%, about 10% to about 30%, about 10% to about 25%, about 10% to about 20%, about 15% to about 100%, about 15% to about 95%, about 15% to about 90%, about 15% to about 85%, about 15% to about 80%, about 15% to about 75%, about 15% to about 70%, about 15% to about 65%, about 15% to about 60%, about 15% to about 55%, about 15% to about 50%, about 15% to about 45%, about 15% to about 40%, about 15% to about 35%, about 15% to about 30%, about 15% to about 25%, about 20% to about 100%, about 20% to about 95%, about 20% to about 90%, about 20% to about 85%, about 20% to about 80%, about 20% to about 75%, about 20% to about 70%, about 20% to about 65%, about 20% to about 60%, about 20% to about 55%, about 20% to about 50%, about 20% to about 45%, about 20% to about 40%, about 20% to about 35%, about 20% to about 30%, about 25% to about 100%, about 25% to about 95%, about 25% to about 90%, about 25% to about 85%, about 25% to about 80%, about 25% to about 75%, about 25% to about 70%, about 25% to about 65%, about 25% to about 60%, about 25% to about 55%, about 25% to about 50%, about 25% to about 45%, about 25% to about 40%, or about 25% to about 35%, exclusion. ENCODE data (described by, e.g., Tilgner, et al., 2012, “Deep sequencing of subcellular RNA fractions shows splicing to be predominantly co-transcriptional in the human genome but inefficient for Inc RNAs,” Genome Research 22(9):1616-25) can be used to aid in identifying exon inclusion or exclusion.

[0279] In some embodiments, contacting cells with an ASO that is complementary to a targeted portion of a PKD1, ABCA4, FUS, CEL, or NSD1 pre-mRNA transcript results in an increase in the amount of polycystin-1, ATP binding cassette subfamily A member 4, FUS RNA binding protein, carboxyl ester lipase, or nuclear receptor binding SET domain protein 1 protein produced by at least 10, 20, 30, 40, 50, 60, 80, 100, 150, 200, 250, 300, 350, 400, 450, 500, or 1000%, compared to the amount of the protein produced by a cell in the absence of the ASO/absence of treatment. In some embodiments, the total amount of polycystin-1, ATP binding cassette subfamily A member 4, FUS RNA binding protein, carboxyl ester lipase, or nuclear receptor binding SET domain protein 1 protein produced by the cell to which the antisense oligomer is contacted is increased about 20% to about 300%, about 50% to about 300%, about 100% to about 300%, about 150% to about 300%, about 20% to about 50%, about 20% to about 100%, about 20% to about 150%, about 20% to about 200%, about 20% to about 250%, about 50% to about 100%, about 50% to about 150%, about 50% to about 200%, about 50% to about 250%, about 100% to about 150%, about 100% to about 200%, about 100% to about 250%, about 150% to about 200%, about 150% to about 250%, about 200% to about 250%, at least about 10%, at least about 20%, at least about 50%, at least about 100%, at least about 150%, at least about 200%, at least about 250%, or at least about 300%, compared to the amount of target protein produced by a control compound. In some embodiments, the total amount of polycystin-1, ATP binding cassette subfamily A member 4, FUS RNA binding protein, carboxyl ester lipase, or nuclear receptor binding SET domain protein 1 protein produced by the cell to which the antisense oligomer is contacted is increased about 1.1 to about 10-fold, about 1.5 to about 10-fold, about 2 to about 10-fold, about 3 to about 10-fold, about 4 to about 10-fold, about 1.1 to about 5-fold, about 1.1 to about 6-fold, about 1.1 to about 7-fold, about 1.1 to about 8-fold, about 1.1 to about 9-fold, about 2 to about 5-fold, about 2 to about 6-fold, about 2 to about 7-fold, about 2 to about 8-fold, about 2 to about 9-fold, about 3 to about 6-fold, about 3 to about 7-fold, about 3 to about 8-fold, about 3 to about 9-fold, about 4 to about 7-fold, about 4 to about 8-fold, about 4 to about 9-fold, at least about 1.1-fold, at least about 1.5-fold, at least about 2-fold, at least about 2.5-fold, at least about 3-fold, at least about 3.5-fold, at least about 4-fold, at least about 5-fold, or at least about 10-fold, compared to the amount of target protein produced by a control compound. A control compound can be, for example, an oligonucleotide that is not complementary to a targeted portion of the pre-mRNA.

[0280] In some embodiments, contacting cells with an ASO that is complementary to a targeted portion of a PKD1, ABCA4, FUS, CEL, or NSD1 pre-mRNA transcript results in an increase in the amount of PKD1, ABCA4, FUS, CEL, or NSD1 mRNA including the mature mRNA encoding the target protein. In some embodiments, the amount of mRNA encoding polycystin-1, ATP binding cassette subfamily A member 4, FUS RNA binding protein, carboxyl ester lipase, or nuclear receptor binding SET domain protein 1 protein, or the mature mRNA encoding the polycystin-1, ATP binding cassette subfamily A member 4, FUS RNA binding protein, carboxyl ester lipase, or nuclear receptor binding SET domain protein 1 protein, is increased by at least 10, 20, 30, 40, 50, 60, 80, 100, 150, 200, 250, 300, 350, 400, 450, 500, or 1000%, compared to the amount of the protein produced by a cell in the absence of the ASO/absence of treatment. In some embodiments, the total amount of the mRNA encoding polycystin-1, ATP binding cassette subfamily A member 4, FUS RNA binding protein, carboxyl ester lipase, or nuclear receptor binding SET domain protein 1 protein, or the mature mRNA encoding polycystin-1, ATP binding cassette subfamily A member 4, FUS RNA binding protein, carboxyl ester lipase, or nuclear receptor binding SET domain protein 1 protein produced in the cell to which the antisense oligomer is contacted is increased about 20% to about 300%, about 50% to about 300%, about 100% to about 300%, about 150% to about 300%, about 20% to about 50%, about 20% to about 100%, about 20% to about 150%, about 20% to about 200%, about 20% to about 250%, about 50% to about 100%, about 50% to about 150%, about 50% to about 200%, about 50% to about 250%, about 100% to about 150%, about 100% to about 200%, about 100% to about 250%, about 150% to about 200%, about 150% to about 250%, about 200% to about 250%, at least about 10%, at least about 20%, at least about 50%, at least about 100%, at least about 150%, at least about 200%, at least about 250%, or at least about 300%, compared to the amount of mature RNA produced in an untreated cell, e.g., an untreated cell or a cell treated with a control compound. In some embodiments, the total amount of the mRNA encoding polycystin-1, ATP binding cassette subfamily A member 4, FUS RNA binding protein, carboxyl ester lipase, or nuclear receptor binding SET domain protein 1 protein, or the mature mRNA encoding polycystin-1, ATP binding cassette subfamily A member 4, FUS RNA binding protein, carboxyl ester lipase, or nuclear receptor binding SET domain protein 1 protein produced in the cell to which the antisense oligomer is contacted is increased about 1.1 to about 10-fold, about 1.5 to about 10-fold, about 2 to about 10-fold, about 3 to about 10-fold, about 4 to about 10-fold, about 1.1 to about 5-fold, about 1.1 to about 6-fold, about 1.1 to about 7-fold, about 1.1 to about 8-fold, about 1.1 to about 9-fold, about 2 to about 5-fold, about 2 to about 6-fold, about 2 to about 7-fold, about 2 to about 8-fold, about 2 to about 9-fold, about 3 to about 6-fold, about 3 to about 7-fold, about 3 to about 8-fold, about 3 to about 9-fold, about 4 to about 7-fold, about 4 to about 8-fold, about 4 to about 9-fold, at least about 1.1-fold, at least about 1.5-fold, at least about 2-fold, at least about 2.5-fold, at least about 3-fold, at least about 3.5-fold, at least about 4-fold, at least about 5-fold, or at least about 10-fold compared to the amount of mature RNA produced in an untreated cell, e.g., an untreated cell or a cell treated with a control compound. A control compound can be, for example, an oligonucleotide that is not complementary to a targeted portion of the PKD1, ABCA4, FUS, CEL, or NSD1 ASCE-containing pre-mRNA.

[0281] The ASCE can be in any length. The ASCE can comprise a canonical exon. The ASCE can comprise a full sequence of a canonical exon. In some embodiments, the ASCE can be from 5 nucleotides to 10 nucleotides in length, from 10 nucleotides to 15 nucleotides in length, from 15 nucleotides to 20 nucleotides in length, from 20 nucleotides to 25 nucleotides in length, from 25 nucleotides to 30 nucleotides in length, from 30 nucleotides to 35 nucleotides in length, from 35 nucleotides to 40 nucleotides in length, from 40 nucleotides to 45 nucleotides in length, from 45 nucleotides to 50 nucleotides in length, from 50 nucleotides to 55 nucleotides in length, from 55 nucleotides to 60 nucleotides in length, from 60 nucleotides to 65 nucleotides in length, from 65 nucleotides to 70 nucleotides in length, from 70 nucleotides to 75 nucleotides in length, from 75 nucleotides to 80 nucleotides in length, from 80 nucleotides to 85 nucleotides in length, from 85 nucleotides to 90 nucleotides in length, from 90 nucleotides to 95 nucleotides in length, or from 95 nucleotides to 100 nucleotides in length. In some embodiments, the ASCE can be at least 10 nucleotides, at least 20 nucleotides, at least 30 nucleotides, at least 40 nucleotides, at least 50 nucleotides, at least 60 nucleoids, at least 70 nucleotides, at least 80 nucleotides in length, at least 90 nucleotides, or at least 100 nucleotides in length. In some embodiments, the ASCE can be from 100 to 200 nucleotides in length, from 200 to 300 nucleotides in length, from 300 to 400 nucleotides in length, from 400 to 500 nucleotides in length, from 500 to 600 nucleotides in length, from 600 to 700 nucleotides in length, from 700 to 800 nucleotides in length, from 800 to 900 nucleotides in length, from 900 to 1,000 nucleotides in length. In some embodiments, the ASCE may be longer than 1,000 nucleotides in length.

[0282] Exclusion of a ASCE can lead to a frameshift and the introduction of a premature termination codon (PIC) in the mature mRNA transcript rendering the transcript a target of NMD. Mature mRNA transcript lacking the ASCE can be non-productive mRNA transcript which does not lead to protein expression. The PIC can be present in any position downstream of the exon upstream of the ASCE in the pre-mRNA. In some embodiments, the PIC can be present in any exon downstream of the exon upstream of the ASCE in the pre-mRNA.

### Therapeutic Agents

[0283] In various embodiments of the present disclosure, compositions and methods comprising a therapeutic agent are provided to modulate protein expression level of ABCA4, FUS, CEL, or NSD1. In some embodiments, provided herein are compositions and methods to modulate alternative splicing of PKD1, ABCA4, FUS, CEL, or NSD1 pre-mRNA. In some embodiments, provided herein are compositions and methods to promote ASCE inclusion in the splicing of PKD1, ABCA4, FUS, CEL, or NSD1 pre-mRNA, e.g., to inhibit ASCE skipping of a ASCE during splicing of PKD1, ABCA4, FUS, CEL, or NSD1 pre-mRNA.

[0284] A therapeutic agent disclosed herein can be an NMD repressor agent. A therapeutic agent may comprise a polynucleic acid polymer.

[0285] According to one aspect of the present disclosure, provided herein is a method of treatment or prevention of a condition or disease associated with a functional polycystin-1, ATP binding cassette subfamily A member 4, FUS RNA binding protein, carboxyl ester lipase, or nuclear receptor binding SET domain protein 1 protein deficiency, comprising administering a ASCE repressor agent to a subject to increase levels of functional polycystin-1, ATP binding cassette subfamily A member 4, FUS RNA binding protein, carboxyl ester lipase, or nuclear receptor binding SET domain protein 1 protein, wherein the agent binds to a region of the pre-mRNA transcript to decrease inclusion of the ASCE in the mature transcript. For example, provided herein is a method of treatment or prevention of a condition associated with a functional polycystin-1, ATP binding cassette subfamily A member 4, FUS RNA binding protein, carboxyl ester lipase, or nuclear receptor binding SET domain protein 1 protein deficiency, comprising administering a ASCE repressor agent to a subject to increase levels of functional polycystin-1, ATP binding cassette subfamily A member 4, FUS RNA binding protein, carboxyl ester lipase, or nuclear receptor binding SET domain protein 1 protein, wherein the agent binds to a region of a pre-mRNA containing an ASCE. For example, provided herein is a method of treatment or prevention of a condition associated with a functional polycystin-1, ATP binding cassette subfamily A member 4, FUS RNA binding protein, carboxyl ester lipase, or nuclear receptor binding SET domain protein 1 protein deficiency, comprising administering a ASCE repressor agent to a subject to increase levels of functional polycystin-1, ATP binding cassette subfamily A member 4, FUS RNA binding protein, carboxyl ester lipase, or nuclear receptor binding SET domain protein 1 protein, wherein the agent binds to a region of a pre-mRNA containing an ASCE (e.g., ASCE (GRCh38/hg38: chr16 2092954 2093093) of PKD1; ASCE (GRCh38/hg38: chr1 94111438 94111579) of ABC4; ASCE (GRCh38/hg38: chr16 31186802 31186836) of FUS; ASCE (GRCh38/hg38: chr9 133066530 133066660) of CEL; ASCE (GRCh38/hg38: chr5 177238237 177238507) of NSD1).

[0286] Where reference is made to promoting ASCE inclusion in the mature mRNA, the promotion may be complete, e.g., 100%, or may be partial. The promotion may be clinically significant. The promotion/correction may be relative to the level of ASCE inclusion in the subject without treatment, or relative to the amount of ASCE inclusion in a population of similar subjects. The promotion/correction may be at least 10% more ASCE inclusion relative to the average subject, or the subject prior to treatment. The promotion may be at least 20% more ASCE inclusion relative to an average subject, or the subject prior to treatment. The promotion may be at least 40% more ASCE inclusion relative to an average subject, or the subject prior to treatment. The promotion may be at least 50% more ASCE inclusion relative to an average subject, or the subject prior to treatment. The promotion may be at least 60% more ASCE inclusion relative to an average subject, or the subject prior to treatment. The promotion may be at least 80% more ASCE inclusion relative to an average subject, or the subject prior to treatment. The promotion may be at least 90% more ASCE inclusion relative to an average subject, or the subject prior to treatment.

[0287] Where reference is made to increasing active polycystin-1, ATP binding cassette subfamily A member 4, FUS RNA binding protein, carboxyl ester lipase, or nuclear receptor binding SET domain protein 1 protein levels, the increase may be clinically significant. The increase may be relative to the level of active polycystin-1, ATP binding cassette subfamily A member 4, FUS RNA binding protein, carboxyl ester lipase, or nuclear receptor binding SET domain protein 1 protein in the subject without treatment, or relative to the amount of active polycystin-1, ATP binding cassette subfamily A member 4, FUS RNA binding protein, carboxyl ester lipase, or nuclear receptor binding SET domain protein 1 protein in a population of similar subjects. The increase may be at least 10% more active polycystin-1, ATP binding cassette subfamily A member 4, FUS RNA binding protein, carboxyl ester lipase, or nuclear receptor binding SET domain protein 1 protein relative to the average subject, or the subject prior to treatment. The increase may be at least 20% more active polycystin-1, ATP binding cassette subfamily A member 4, FUS RNA binding protein, carboxyl ester lipase, or nuclear receptor binding SET domain protein 1 protein relative to the average subject, or the subject prior to treatment. The increase may be at least 40% more active polycystin-1, ATP binding cassette subfamily A member 4, FUS RNA binding protein, carboxyl ester lipase, or nuclear receptor binding SET domain protein 1 protein relative to the average subject, or the subject prior to treatment. The increase may be at least 50% more active polycystin-1, ATP binding cassette subfamily A member 4, FUS RNA binding protein, carboxyl ester lipase, or nuclear receptor binding SET domain protein 1 protein relative to the average subject, or the subject prior to treatment. The increase may be at least 80% more active polycystin-1, ATP binding cassette subfamily A member 4, FUS RNA binding protein, carboxyl ester lipase, or nuclear receptor binding SET domain protein 1 protein relative to the average subject, or the subject prior to treatment. The increase may be at least 100% more active polycystin-1, ATP binding cassette subfamily A member 4, FUS RNA binding protein, carboxyl ester lipase, or nuclear receptor binding SET domain protein 1 protein relative to the average subject, or the subject prior to treatment. The increase may be at least 200% more active polycystin-1, ATP binding cassette subfamily A member 4, FUS RNA binding protein, carboxyl ester lipase, or nuclear receptor binding SET domain protein 1 protein relative to the average subject, or the subject prior to treatment. The increase may be at least 500% more active polycystin-1, ATP binding cassette subfamily A member 4, FUS RNA binding protein, carboxyl ester lipase, or nuclear receptor binding SET domain protein 1 protein relative to the average subject, or the subject prior to treatment.

[0288] In embodiments wherein the ASCE repressor agent comprises a polynucleic acid polymer, the polynucleic acid polymer may be about 50 nucleotides in length. The polynucleic acid polymer may be about 45 nucleotides in length. The polynucleic acid polymer may be about 40 nucleotides in length. The polynucleic acid polymer may be about 35 nucleotides in length. The polynucleic acid polymer may be about 30 nucleotides in length. The polynucleic acid polymer may be about 24 nucleotides in length. The polynucleic acid polymer may be about 25 nucleotides in length. The polynucleic acid polymer may be about 20 nucleotides in length. The polynucleic acid polymer may be about 19 nucleotides in length. The polynucleic acid polymer may be about 18 nucleotides in length. The polynucleic acid polymer may be about 17 nucleotides in length. The polynucleic acid polymer may be about 16 nucleotides in length. The polynucleic acid polymer may be about 15 nucleotides in length. The polynucleic acid polymer may be about 14 nucleotides in length. The polynucleic acid polymer may be about 13 nucleotides in length. The polynucleic acid polymer may be about 12 nucleotides in length. The polynucleic acid polymer may be about 11 nucleotides in length. The polynucleic acid polymer may be about 10 nucleotides in length. The polynucleic acid polymer may be between about 10 and about 50 nucleotides in length. The polynucleic acid polymer may be between about 10 and about 45 nucleotides in length. The polynucleic acid polymer may be between about 10 and about 40 nucleotides in length. The polynucleic acid polymer may be between about 10 and about 35 nucleotides in length. The polynucleic acid polymer may be between about 10 and about 30 nucleotides in length. The polynucleic acid polymer may be between about 10 and about 25 nucleotides in length. The polynucleic acid polymer may be between about 10 and about 20 nucleotides in length. The polynucleic acid polymer may be between about 15 and about 25 nucleotides in length. The polynucleic acid polymer may be between about 15 and about 30 nucleotides in length. The polynucleic acid polymer may be between about 12 and about 30 nucleotides in length.

[0289] The sequence of the polynucleic acid polymer may be at least 50%, 55%, 60%, 65%, 70%, 75%, 80%, 85%, 90%, 91%, 92%, 93%, 94%, 95%, 96%, 97%, 98%, 99%, or 99.5% complementary to a target sequence of an mRNA transcript, e.g., a partially processed mRNA transcript. The sequence of the polynucleic acid polymer may be 100% complementary to a target sequence of a pre-mRNA transcript.

[0290] The sequence of the polynucleic acid polymer may have 4 or fewer mismatches to a target sequence of the pre-mRNA transcript. The sequence of the polynucleic acid polymer may have 3 or fewer mismatches to a target sequence of the pre-mRNA transcript. The sequence of the polynucleic acid polymer may have 2 or fewer mismatches to a target sequence of the pre-mRNA transcript. The sequence of the polynucleic acid polymer may have 1 or fewer mismatches to a target sequence of the pre-mRNA transcript. The sequence of the polynucleic acid polymer may have no mismatches to a target sequence of the pre-mRNA transcript.

[0291] The polynucleic acid polymer may specifically hybridize to a target sequence of the pre-mRNA transcript. For example, the polynucleic acid polymer may have 91%, 92%, 93%, 94%, 95%, 96%, 97%, 98%, 99%, 99.5% or 100% sequence complementarity to a target sequence of the pre-mRNA transcript. The hybridization may be under high stringent hybridization conditions.

[0292] The polynucleic acid polymer comprising a sequence with at least 50%, 55%, 60%, 65%, 70%, 75%, 80%, 85%, 90%, 91%, 92%, 93%, 94%, 95%, 96%, 97%, 98%, 99%, or 99.5% sequence identity to a sequence selected from the group consisting of SEQ ID NOS: 16-309. The polynucleic acid polymer may comprise a sequence with 100% sequence identity to a sequence selected from the group consisting of SEQ ID NOS: 16-309.

[0293] Where reference is made to a polynucleic acid polymer sequence, the skilled person will understand that one or more substitutions may be tolerated, optionally two substitutions may be tolerated in the sequence, such that it maintains the ability to hybridize to the target sequence; or where the substitution is in a target sequence, the ability to be recognized as the target sequence. References to sequence identity may be determined by BLAST sequence alignment using standard/default parameters. For example, the sequence may have 99% identity and still function according to the present disclosure. In other embodiments, the sequence may have 98% identity and still function according to the present disclosure. In another embodiment, the sequence may have 95% identity and still function according to the present disclosure. In another embodiment, the sequence may have 90% identity and still function according to the present disclosure.

### Antisense Oligomers

[0294] Provided herein is a composition comprising an antisense oligomer that induces exon skipping by binding to a targeted portion of a PKD1, ABCA4, FUS, CEL, or NSD1 ASCE-containing pre-mRNA. As used herein, the terms “ASO” and “antisense oligomer” are used interchangeably and refer to an oligomer such as a polynucleotide, comprising nucleobases that hybridizes to a target nucleic acid (e.g., a PKD1, ABCA4, FUS, CEL, or NSD1 ASCE-containing pre-mRNA) sequence by Watson-Crick base pairing or wobble base pairing (G-U). The ASO may have exact sequence complementary to the target sequence or near complementarity (e.g., sufficient complementarity to bind the target sequence and enhancing splicing at a splice site). ASOs are designed so that they bind (hybridize) to a target nucleic acid (e.g., a targeted portion of a pre-mRNA transcript) and remain hybridized under physiological conditions. Typically, if they hybridize to a site other than the intended (targeted) nucleic acid sequence, they hybridize to a limited number of sequences that are not a target nucleic acid (to a few sites other than a target nucleic acid). Design of an ASO can take into consideration the occurrence of the nucleic acid sequence of the targeted portion of the pre-mRNA transcript or a sufficiently similar nucleic acid sequence in other locations in the genome or cellular pre-mRNA or transcriptome, such that the likelihood the ASO will bind other sites and cause “off-target” effects is limited. Any antisense oligomers known in the art, for example in PCT Application No. PCT/US2014/054151, published as WO 2015/035091, titled “Reducing Nonsense-Mediated mRNA Decay,” incorporated by reference herein, can be used to practice the methods described herein.

[0295] In some embodiments, ASOs “specifically hybridize” to or are “specific” to a target nucleic acid or a targeted portion of an ASCE-containing pre-mRNA. Typically, such hybridization occurs with a Tₘ substantially greater than 37° C., preferably at least 50° C., and typically between 60° C. to approximately 90° C. Such hybridization preferably corresponds to stringent hybridization conditions. At a given ionic strength and pH, the Tₘ is the temperature at which 50% of a target sequence hybridizes to a complementary oligonucleotide.

[0296] Oligomers, such as oligonucleotides, are “complementary” to one another when hybridization occurs in an antiparallel configuration between two single-stranded polynucleotides. A double-stranded polynucleotide can be “complementary” to another polynucleotide if hybridization can occur between one of the strands of the first polynucleotide and the second. Complementarity (the degree to which one polynucleotide is complementary with another) is quantifiable in terms of the proportion (e.g., the percentage) of bases in opposing strands that are expected to form hydrogen bonds with each other, according to generally accepted base-pairing rules. The sequence of an antisense oligomer (ASO) need not be 100% complementary to that of its target nucleic acid to hybridize. In certain embodiments, ASOs can comprise at least 70%, at least 75%, at least 80%, at least 85%, at least 90%, at least 95%, at least 96%, at least 97%, at least 98%, or at least 99% sequence complementarity to a target region within the target nucleic acid sequence to which they are targeted. For example, an ASO in which 18 of 20 nucleobases of the oligomeric compound are complementary to a target region, and would therefore specifically hybridize, would represent 90 percent complementarity. In this example, the remaining non-complementary nucleobases may be clustered together or interspersed with complementary nucleobases and need not be contiguous to each other or to complementary nucleobases. Percent complementarity of an ASO with a region of a target nucleic acid can be determined routinely using BLAST programs (basic local alignment search tools) and PowerBLAST programs known in the art (Altschul, et al., J. Mol. Biol., 1990, 215, 403-410; Zhang and Madden, Genome Res., 1997, 7, 649-656).

[0297] An ASO need not hybridize to all nucleobases in a target sequence and the nucleobases to which it does hybridize may be contiguous or noncontiguous. ASOs may hybridize over one or more segments of a pre-mRNA transcript, such that intervening or adjacent segments are not involved in the hybridization event (e.g., a loop structure or hairpin structure may be formed). In certain embodiments, an ASO hybridizes to noncontiguous nucleobases in a target pre-mRNA transcript. For example, an ASO can hybridize to nucleobases in a pre-mRNA transcript that are separated by one or more nucleobase(s) to which the ASO does not hybridize.

[0298] The ASOs described herein comprise nucleobases that are complementary to nucleobases present in a target portion of an ASCE-containing pre-mRNA. The term ASO embodies oligonucleotides and any other oligomeric molecule that comprises nucleobases capable of hybridizing to a complementary nucleobase on a target mRNA but does not comprise a sugar moiety, such as a peptide nucleic acid (PNA). The ASOs may comprise naturally-occurring nucleotides, nucleotide analogs, modified nucleotides, or any combination of two or three of the preceding. The term “naturally occurring nucleotides” includes deoxyribonucleotides and ribonucleotides. The term “modified nucleotides” includes nucleotides with modified or substituted sugar groups and/or having a modified backbone. In some embodiments, all of the nucleotides of the ASO are modified nucleotides. Chemical modifications of ASOs or components of ASOs that are compatible with the methods and compositions described herein will be evident to one of skill in the art and can be found, for example, in U.S. Pat. Nos. 8,258,109 B2, 5,656,612, U.S. Patent Publication No. 2012/0190728, and Dias and Stein, Mol. Cancer Ther. 2002, 347-355, herein incorporated by reference in their entirety.

[0299] One or more nucleobases of an ASO may be any naturally occurring, unmodified nucleobase such as adenine, guanine, cytosine, thymine and uracil, or any synthetic or modified nucleobase that is sufficiently similar to an unmodified nucleobase such that it is capable of hydrogen bonding with a nucleobase present on a target pre-mRNA. Examples of modified nucleobases include, without limitation, hypoxanthine, xanthine, 7-methylguanine, 5, 6-dihydrouracil, 5-methylcytosine, and 5-hydroxymethoylcytosine.

[0300] The ASOs described herein also comprise a backbone structure that connects the components of an oligomer. The term “backbone structure” and “oligomer linkages” may be used interchangeably and refer to the connection between monomers of the ASO. In naturally occurring oligonucleotides, the backbone comprises a 3′-5′ phosphodiester linkage connecting sugar moieties of the oligomer. The backbone structure or oligomer linkages of the ASOs described herein may include (but are not limited to) phosphorothioate, phosphorodithioate, phosphoroselenoate, phosphorodiselenoate, phosphoroanilothioate, phosphoraniladate, phosphoramidate, and the like. See, e.g., LaPlanche, et al., Nucleic Acids Res. 14:9081 (1986); Stec, et al., J. Am. Chem. Soc. 106:6077 (1984), Stein, et al., Nucleic Acids Res. 16:3209 (1988), Zon, et al., Anti-Cancer Drug Design 6:539 (1991); Zon, et al., Oligonucleotides and Analogues: A Practical Approach, pp. 87-108 (F. Eckstein, Ed., Oxford University Press, Oxford England (1991)); Stec, et al., U.S. Pat. No. 5,151,510; Uhlmann and Peyman, Chemical Reviews 90:543 (1990). In some embodiments, the backbone structure of the ASO does not contain phosphorous but rather contains peptide bonds, for example in a peptide nucleic acid (PNA), or linking groups including carbamate, amides, and linear and cyclic hydrocarbon groups. In some embodiments, the backbone modification is a phosphorothioate linkage. In some embodiments, the backbone modification is a phosphoramidate linkage.

[0301] In some embodiments, the stereochemistry at each of the phosphorus internucleotide linkages of the ASO backbone is random. In some embodiments, the stereochemistry at each of the phosphorus internucleotide linkages of the ASO backbone is controlled and is not random. For example, U.S. Pat. App. Pub. No. 2014/0194610, “Methods for the Synthesis of Functionalized Nucleic Acids,” incorporated herein by reference, describes methods for independently selecting the handedness of chirality at each phosphorous atom in a nucleic acid oligomer. In some embodiments, an ASO used in the methods of the disclosure, including, but not limited to, any of the ASOs set forth herein in Tables 4, 5A, 5A-1, 5B, 5B-1, 5D, 5E, 5G, and 5G-1, comprises an ASO having phosphorus internucleotide linkages that are not random. In some embodiments, a composition used in the methods of the disclosure comprises a pure diastereomeric ASO. In some embodiments, a composition used in the methods of the disclosure comprises an ASO that has diastereomeric purity of at least about 90%, at least about 91%, at least about 92%, at least about 93%, at least about 94%, at least about 95%, at least about 96%, at least about 97%, at least about 98%, at least about 99%, about 100%, about 90% to about 100%, about 91% to about 100%, about 92% to about 100%, about 93% to about 100%, about 94% to about 100%, about 95% to about 100%, about 96% to about 100%, about 97% to about 100%, about 98% to about 100%, or about 99% to about 100%.

[0302] In some embodiments, the ASO has a nonrandom mixture of Rp and Sp configurations at its phosphorus internucleotide linkages. For example, it has been suggested that a mix of Rp and Sp is required in antisense oligonucleotides to achieve a balance between good activity and nuclease stability (Wan, et al., 2014, “Synthesis, biophysical properties and biological activity of second-generation antisense oligonucleotides containing chiral phosphorothioate linkages,” Nucleic Acids Research 42(22): 13456-13468, incorporated herein by reference). In some embodiments, an ASO used in the methods of the disclosure, including, but not limited to, any of the ASOs set forth herein in SEQ ID NOS: 16-309, comprises about 5-100% Rp, at least about 5% Rp, at least about 10% Rp, at least about 15% Rp, at least about 20% Rp, at least about 25% Rp, at least about 30% Rp, at least about 35% Rp, at least about 40% Rp, at least about 45% Rp, at least about 50% Rp, at least about 55% Rp, at least about 60% Rp, at least about 65% Rp, at least about 70% Rp, at least about 75% Rp, at least about 80% Rp, at least about 85% Rp, at least about 90% Rp, or at least about 95% Rp, with the remainder Sp, or about 100% Rp. In some embodiments, an ASO used in the methods of the disclosure, including, but not limited to, any of the ASOs set forth herein comprise a sequence with at least about 80%, 85%, 90%, 95%, 97%, or 100% sequence identity to a region comprising at least 8 contiguous nucleic acids of any one of SEQ ID NOS: 16-309, comprises about 10% to about 100% Rp, about 15% to about 100% Rp, about 20% to about 100% Rp, about 25% to about 100% Rp, about 30% to about 100% Rp, about 35% to about 100% Rp, about 40% to about 100% Rp, about 45% to about 100% Rp, about 50% to about 100% Rp, about 55% to about 100% Rp, about 60% to about 100% Rp, about 65% to about 100% Rp, about 70% to about 100% Rp, about 75% to about 100% Rp, about 80% to about 100% Rp, about 85% to about 100% Rp, about 90% to about 100% Rp, or about 95% to about 100% Rp, about 20% to about 80% Rp, about 25% to about 75% Rp, about 30% to about 70% Rp, about 40% to about 60% Rp, or about 45% to about 55% Rp, with the remainder Sp.

[0303] In some embodiments, an ASO used in the methods of the disclosure, including, but not limited to, any of the ASOs set forth herein comprise a sequence that is complementary to a sequence with at least about 80%, 85%, 90%, 95%, 97%, or 100% sequence identity to a region comprising at least 8 contiguous nucleic acids of any one of SEQ ID NOS: 6-10, comprises about 5-100% Sp, at least about 5% Sp, at least about 10% Sp, at least about 15% Sp, at least about 20% Sp, at least about 25% Sp, at least about 30% Sp, at least about 35% Sp, at least about 40% Sp, at least about 45% Sp, at least about 50% Sp, at least about 55% Sp, at least about 60% Sp, at least about 65% Sp, at least about 70% Sp, at least about 75% Sp, at least about 80% Sp, at least about 85% Sp, at least about 90% Sp, or at least about 95% Sp, with the remainder Rp, or about 100% Sp. In embodiments, an ASO used in the methods of the disclosure, including, but not limited to, any of the ASOs set forth herein comprise a sequence that is complementary to a sequence with at least about 80%, 85%, 90%, 95%, 97%, or 100% sequence identity to a region comprising at least 8 contiguous nucleic acids of any one of SEQ ID NOS: 6-10, comprises about 10% to about 100% Sp, about 15% to about 100% Sp, about 20% to about 100% Sp, about 25% to about 100% Sp, about 30% to about 100% Sp, about 35% to about 100% Sp, about 40% to about 100% Sp, about 45% to about 100% Sp, about 50% to about 100% Sp, about 55% to about 100% Sp, about 60% to about 100% Sp, about 65% to about 100% Sp, about 70% to about 100% Sp, about 75% to about 100% Sp, about 80% to about 100% Sp, about 85% to about 100% Sp, about 90% to about 100% Sp, or about 95% to about 100% Sp, about 20% to about 80% Sp, about 25% to about 75% Sp, about 30% to about 70% Sp, about 40% to about 60% Sp, or about 45% to about 55% Sp, with the remainder Rp.

[0304] Any of the ASOs described herein may contain a sugar moiety that comprises ribose or deoxyribose, as present in naturally occurring nucleotides, or a modified sugar moiety or sugar analog, including a morpholine ring. Non-limiting examples of modified sugar moieties include 2′ substitutions such as 2′-O-methyl (2′-O-Me), 2′-O-methoxyethyl (2′MOE), 2′-O-aminoethyl, 2′F; N3′->P5′ phosphoramidate, 2′dimethylaminooxyethoxy, 2′dimethylaminoethoxyethoxy, 2′-guanidinidium, 2′-O-guanidinium ethyl, carbamate modified sugars, and bicyclic modified sugars. In some embodiments, the sugar moiety modification is selected from 2′-O-Me, 2′F, and 2′MOE. In some embodiments, the sugar moiety modification is an extra bridge bond, such as in a locked nucleic acid (LNA). In some embodiments the sugar analog contains a morpholine ring, such as phosphorodiamidate morpholino (PMO). In some embodiments, the sugar moiety comprises a ribofuransyl or 2′deoxyribofuransyl modification. In some embodiments, the sugar moiety comprises 2′4′-constrained 2′O-methyloxyethyl (cMOE) modifications. In some embodiments, the sugar moiety comprises cEt 2′, 4′ constrained 2′-O ethyl BNA modifications. In some embodiments, the sugar moiety comprises tricycloDNA (tcDNA) modifications. In some embodiments, the sugar moiety comprises ethylene nucleic acid (ENA) modifications. In some embodiments, the sugar moiety comprises MCE modifications. Modifications are known in the art and described in the literature, e.g., by Jarver, et al., 2014, “A Chemical View of Oligonucleotides for Exon Skipping and Related Drug Applications,” Nucleic Acid Therapeutics 24(1): 37-47, incorporated by reference for this purpose herein.

[0305] In some embodiments, each monomer of the ASO is modified in the same way, for example each linkage of the backbone of the ASO comprises a phosphorothioate linkage or each ribose sugar moiety comprises a 2′O-methyl modification. Such modifications that are present on each of the monomer components of an ASO are referred to as “uniform modifications.” In some examples, a combination of different modifications may be desired, for example, an ASO may comprise a combination of phosphorodiamidate linkages and sugar moieties comprising morpholine rings (morpholinos). Combinations of different modifications to an ASO are referred to as “mixed modifications” or “mixed chemistries.”

[0306] In some embodiments, the ASO comprises one or more backbone modifications. In some embodiments, the ASO comprises one or more sugar moiety modification. In some embodiments, the ASO comprises one or more backbone modifications and one or more sugar moiety modifications. In some embodiments, the ASO comprises a 2′MOE modification and a phosphorothioate backbone. In some embodiments, the ASO comprises a phosphorodiamidate morpholino (PMO). In some embodiments, the ASO comprises a peptide nucleic acid (PNA). Any of the ASOs or any component of an ASO (e.g., a nucleobase, sugar moiety, backbone) described herein may be modified in order to achieve desired properties or activities of the ASO or reduce undesired properties or activities of the ASO. For example, an ASO or one or more components of any ASO may be modified to enhance binding affinity to a target sequence on a pre-mRNA transcript; reduce binding to any non-target sequence; reduce degradation by cellular nucleases (i.e., RNase H); improve uptake of the ASO into a cell and/or into the nucleus of a cell; alter the pharmacokinetics or pharmacodynamics of the ASO; and/or modulate the half-life of the ASO.

[0307] In some embodiments, the ASOs are comprised of 2′-O-(2-methoxyethyl) (MOE) phosphorothioate-modified nucleotides. ASOs comprised of such nucleotides are especially well-suited to the methods disclosed herein; oligomers having such modifications have been shown to have significantly enhanced resistance to nuclease degradation and increased bioavailability, making them suitable, for example, for oral delivery in some embodiments described herein. See e.g., Geary, et al., J Pharmacol Exp Ther. 2001; 296(3):890-7; Geary, et al., J Pharmacol Exp Ther. 2001; 296(3):898-904.

[0308] Methods of synthesizing ASOs will be known to one of skill in the art. Alternatively or in addition, ASOs may be obtained from a commercial source.

[0309] Unless specified otherwise, the left-hand end of single-stranded nucleic acid (e.g., pre-mRNA transcript, oligonucleotide, ASO, etc.) sequences is the 5′ end and the left-hand direction of single or double-stranded nucleic acid sequences is referred to as the 5′ direction. Similarly, the right-hand end or direction of a nucleic acid sequence (single or double stranded) is the 3′ end or direction. Generally, a region or sequence that is 5′ to a reference point in a nucleic acid is referred to as “upstream,” and a region or sequence that is 3′ to a reference point in a nucleic acid is referred to as “downstream.” Generally, the 5′ direction or end of an mRNA is where the initiation or start codon is located, while the 3′ end or direction is where the termination codon is located. In some aspects, nucleotides that are upstream of a reference point in a nucleic acid may be designated by a negative number, while nucleotides that are downstream of a reference point may be designated by a positive number. For example, a reference point (e.g., an exon-exon junction in mRNA) may be designated as the “zero” site, and a nucleotide that is directly adjacent and upstream of the reference point is designated “minus one,” e.g., “−1,” while a nucleotide that is directly adjacent and downstream of the reference point is designated “plus one,” e.g., “+1.”

[0310] In some embodiments, the ASOs are complementary to (and bind to) a targeted portion of a PKD1, ABCA4, FUS, CEL, or NSD1 ASCE-containing pre-mRNA that is downstream (in the 3′ direction) of the 5′ splice site (or 3′ end of the ASCE) of the ASCE in a PKD1, ABCA4, FUS, CEL, or NSD1 ASCE-containing pre-mRNA (e.g., the direction designated by positive numbers relative to the 5′ splice site). In some embodiments, the ASOs are complementary to a targeted portion of the PKD1, ABCA4, FUS, CEL, or NSD1 ASCE-containing pre-mRNA that is within the region about +1 to about +500 relative to the 5′ splice site (or 3′ end) of the ASCE. In some embodiments, the ASOs may be complementary to a targeted portion of a PKD1, ABCA4, FUS, CEL, or NSD1 ASCE-containing pre-mRNA that is within the region between nucleotides +6 and +40,000 relative to the 5′ splice site (or 3′ end) of the ASCE. In some aspects, the ASOs are complementary to a targeted portion that is within the region about +1 to about +40,000, about +1 to about +30,000, about +1 to about +20,000, about +1 to about +15,000, about +1 to about +10,000, about +1 to about +5,000, about +1 to about +4,000, about +1 to about +3,000, about +1 to about +2,000, about +1 to about +1,000, about +1 to about +500, about +1 to about +490, about +1 to about +480, about +1 to about +470, about +1 to about +460, about +1 to about +450, about +1 to about +440, about +1 to about +430, about +1 to about +420, about +1 to about +410, about +1 to about +400, about +1 to about +390, about +1 to about +380, about +1 to about +370, about +1 to about +360, about +1 to about +350, about +1 to about +340, about +1 to about +330, about +1 to about +320, about +1 to about +310, about +1 to about +300, about +1 to about +290, about +1 to about +280, about +1 to about +270, about +1 to about +260, about +1 to about +250, about +1 to about +240, about +1 to about +230, about +1 to about +220, about +1 to about +210, about +1 to about +200, about +1 to about +190, about +1 to about +180, about +1 to about +170, about +1 to about +160, about +1 to about +150, about +1 to about +140, about +1 to about +130, about +1 to about +120, about +1 to about +110, about +1 to about +100, about +1 to about +90, about +1 to about +80, about +1 to about +70, about +1 to about +60, about +1 to about +50, about +1 to about +40, about +1 to about +30, or about +1 to about +20 relative to 5′ splice site (or 3′ end) of the ASCE. In some aspects, the ASOs are complementary to a targeted portion that is within the region from about +1 to about +100, from about +100 to about +200, from about +200 to about +300, from about +300 to about +400, or from about +400 to about +500 relative to 5′ splice site (or 3′ end) of the ASCE.

[0311] In some embodiments, the ASOs are complementary to (and bind to) a targeted portion of a PKD1, ABCA4, FUS, CEL, or NSD1 ASCE-containing pre-mRNA that is upstream (in the 5′ direction) of the 5′ splice site (or 3′ end) of the ASCE in a PKD1, ABCA4, FUS, CEL, or NSD1 ASCE-containing pre-mRNA (e.g., the direction designated by negative numbers relative to the 5′ splice site). In some embodiments, the ASOs are complementary to a targeted portion of the PKD1, ABCA4, FUS, CEL, or NSD1 ASCE-containing pre-mRNA that is within the region about −4 to about −270 relative to the 5′ splice site (or 3′end) of the ASCE. In some embodiments, the ASOs may be complementary to a targeted portion of a PKD1, ABCA4, FUS, CEL, or NSD1 ASCE-containing pre-mRNA that is within the region between nucleotides −1 and −40,000 relative to the 5′ splice site (or 3′ end) of the ASCE. In some aspects, the ASOs are complementary to a targeted portion that is within the region about −1 to about −40,000, about −1 to about −30,000, about −1 to about −20,000, about −1 to about −15,000, about −1 to about −10,000, about −1 to about −5,000, about −1 to about −4,000, about −1 to about −3,000, about −1 to about −2,000, about −1 to about −1,000, about −1 to about −500, about −1 to about −490, about −1 to about −480, about −1 to about −470, about −1 to about −460, about −1 to about −450, about −1 to about −440, about −1 to about −430, about −1 to about −420, about −1 to about −410, about −1 to about −400, about −1 to about −390, about −1 to about −380, about −1 to about −370, about −1 to about −360, about −1 to about −350, about −1 to about −340, about −1 to about −330, about −1 to about −320, about −1 to about −310, about −1 to about −300, about −1 to about −290, about −1 to about −280, about −1 to about −270, about −1 to about −260, about −1 to about −250, about −1 to about −240, about −1 to about −230, about −1 to about −220, about −1 to about −210, about −1 to about −200, about −1 to about −190, about −1 to about −180, about −1 to about −170, about −1 to about −160, about −1 to about −150, about −1 to about −140, about −1 to about −130, about −1 to about −120, about −1 to about −110, about −1 to about −100, about −1 to about −90, about −1 to about −80, about −1 to about −70, about −1 to about −60, about −1 to about −50, about −1 to about −40, about −1 to about −30, or about −1 to about −20 relative to 5′ splice site (or 3′ end) of the ASCE.

[0312] In some embodiments, the ASOs are complementary to a targeted region of a PKD1, ABCA4, FUS, CEL, or NSD1 ASCE-containing pre-mRNA that is upstream (in the 5′ direction) of the 3′ splice site (or 5′ end) of the ASCE in a PKD1, ABCA4, FUS, CEL, or NSD1 ASCE-containing pre-mRNA (e.g., in the direction designated by negative numbers). In some embodiments, the ASOs are complementary to a targeted portion of the PKD1, ABCA4, FUS, CEL, or NSD1 ASCE-containing pre-mRNA that is within the region about −1 to about −500 relative to the 3′ splice site (or 5′ end) of the ASCE. In some embodiments, the ASOs are complementary to a targeted portion of the PKD1, ABCA4, FUS, CEL, or NSD1 ASCE-containing pre-mRNA that is within the region −1 to −40,000 relative to the 3′ splice site of the ASCE. In some aspects, the ASOs are complementary to a targeted portion that is within the region about −1 to about −40,000, about −1 to about −30,000, −1 to about −20,000, about −1 to about −15,000, about −1 to about −10,000, about −1 to about −5,000, about −1 to about −4,000, about −1 to about −3,000, about −1 to about −2,000, about −1 to about −1,000, about −1 to about −500, about −1 to about −490, about −1 to about −480, about −1 to about −470, about −1 to about −460, about −1 to about −450, about −1 to about −440, about −1 to about −430, about −1 to about −420, about −1 to about −410, about −1 to about −400, about −1 to about −390, about −1 to about −380, about −1 to about −370, about −1 to about −360, about −1 to about −350, about −1 to about −340, about −1 to about −330, about −1 to about −320, about −1 to about −310, about −1 to about −300, about −1 to about −290, about −1 to about −280, about −1 to about −270, about −1 to about −260, about −1 to about −250, about −1 to about −240, about −1 to about −230, about −1 to about −220, about −1 to about −210, about −1 to about −200, about −1 to about −190, about −1 to about −180, about −1 to about −170, about −1 to about −160, about −1 to about −150, about −1 to about −140, about −1 to about −130, about −1 to about −120, about −1 to about −110, about −1 to about −100, about −1 to about −90, about −1 to about −80, about −1 to about −70, about −1 to about −60, about −1 to about −50, about −1 to about −40, about −1 to about −30, or about −1 to about −20 relative to 3′ splice site of the ASCE. In some aspects, the ASOs are complementary to a targeted portion that is within the region from about −1 to about −100, from about −100 to about −200, from about −200 to about −300, from about −300 to about −400, or from about −400 to about −500 relative to 3′ splice site of the ASCE.

[0313] In some embodiments, the ASOs are complementary to a targeted region of a PKD1, ABCA4, FUS, CEL, or NSD1 ASCE-containing pre-mRNA that is downstream (in the 3′ direction) of the 3′ splice site (5′ end) of the ASCE in a PKD1, ABCA4, FUS, CEL, or NSD1 ASCE-containing pre-mRNA (e.g., in the direction designated by positive numbers). In some embodiments, the ASOs are complementary to a targeted portion of the PKD1, ABCA4, FUS, CEL, or NSD1 ASCE-containing pre-mRNA that is within the region of about +1 to about +40,000 relative to the 3′ splice site of the ASCE. In some aspects, the ASOs are complementary to a targeted portion that is within the region about +1 to about +40,000, about +1 to about +30,000, about +1 to about +20,000, about +1 to about +15,000, about +1 to about +10,000, about +1 to about +5,000, about +1 to about +4,000, about +1 to about +3,000, about +1 to about +2,000, about +1 to about +1,000, about +1 to about +500, about +1 to about +490, about +1 to about +480, about +1 to about +470, about +1 to about +460, about +1 to about +450, about +1 to about +440, about +1 to about +430, about +1 to about +420, about +1 to about +410, about +1 to about +400, about +1 to about +390, about +1 to about +380, about +1 to about +370, about +1 to about +360, about +1 to about +350, about +1 to about +340, about +1 to about +330, about +1 to about +320, about +1 to about +310, about +1 to about +300, about +1 to about +290, about +1 to about +280, about +1 to about +270, about +1 to about +260, about +1 to about +250, about +1 to about +240, about +1 to about +230, about +1 to about +220, about +1 to about +210, about +1 to about +200, about +1 to about +190, about +1 to about +180, about +1 to about +170, about +1 to about +160, about +1 to about +150, about +1 to about +140, about +1 to about +130, about +1 to about +120, about +1 to about +110, about +1 to about +100, about +1 to about +90, about +1 to about +80, about +1 to about +70, about +1 to about +60, about +1 to about +50, about +1 to about +40, about +1 to about +30, or about +1 to about +20, or about +1 to about +10 relative to 3′ splice site of the ASCE.

[0314] In some embodiments, the targeted portion of the PKD1, ABCA4, FUS, CEL, or NSD1 ASCE-containing pre-mRNA is within the region +100 relative to the 5′ splice site (3′ end) of the ASCE to −100 relative to the 3′ splice site (5′ end) of the ASCE. In some embodiments, the targeted portion of the PKD1, ABCA4, FUS, CEL, or NSD1 ASCE-containing pre-mRNA is within the ASCE. In some embodiments, the target portion of the PKD1, ABCA4, FUS, CEL, or NSD1 ASCE-containing pre-mRNA comprises a ASCE and intron boundary. In some embodiments, the target portion of the PKD1, ABCA4, FUS, CEL, or NSD1 ASCE-containing pre-mRNA does not comprise a ASCE and intron boundary.

[0315] The ASOs may be of any length suitable for specific binding and effective reduction of splicing. In some embodiments, the ASOs consist of 8 to 50 nucleobases. For example, the ASO may be 8, 9, 10, 11, 12, 13, 14, 15, 16, 17, 18, 19, 20, 21, 22, 23, 24, 25, 26, 27, 28, 29, 30, 31, 32, 33, 34, 35, 40, 45, or 50 nucleobases in length. In some embodiments, the ASOs consist of more than 50 nucleobases. In some embodiments, the ASO is from 8 to 50 nucleobases, 8 to 40 nucleobases, 8 to 35 nucleobases, 8 to 30 nucleobases, 8 to 25 nucleobases, 8 to 20 nucleobases, 8 to 15 nucleobases, 9 to 50 nucleobases, 9 to 40 nucleobases, 9 to 35 nucleobases, 9 to 30 nucleobases, 9 to 25 nucleobases, 9 to 20 nucleobases, 9 to 15 nucleobases, 10 to 50 nucleobases, 10 to 40 nucleobases, 10 to 35 nucleobases, 10 to 30 nucleobases, 10 to 25 nucleobases, 10 to 20 nucleobases, 10 to 15 nucleobases, 11 to 50 nucleobases, 11 to 40 nucleobases, 11 to 35 nucleobases, 11 to 30 nucleobases, 11 to 25 nucleobases, 11 to 20 nucleobases, 11 to 15 nucleobases, 12 to 50 nucleobases, 12 to 40 nucleobases, 12 to 35 nucleobases, 12 to 30 nucleobases, 12 to 25 nucleobases, 12 to 20 nucleobases, 12 to 15 nucleobases, 13 to 50 nucleobases, 13 to 40 nucleobases, 13 to 35 nucleobases, 13 to 30 nucleobases, 13 to 25 nucleobases, 13 to 20 nucleobases, 14 to 50 nucleobases, 14 to 40 nucleobases, 14 to 35 nucleobases, 14 to 30 nucleobases, 14 to 25 nucleobases, 14 to 20 nucleobases, 15 to 50 nucleobases, 15 to 40 nucleobases, 15 to 35 nucleobases, 15 to 30 nucleobases, 15 to 25 nucleobases, 15 to 20 nucleobases, 20 to 50 nucleobases, 20 to 40 nucleobases, 20 to 35 nucleobases, 20 to 30 nucleobases, 20 to 25 nucleobases, 25 to 50 nucleobases, 25 to 40 nucleobases, 25 to 35 nucleobases, or 25 to 30 nucleobases in length. In some embodiments, the ASOs are 18 nucleotides in length. In some embodiments, the ASOs are 15 nucleotides in length. In some embodiments, the ASOs are 25 nucleotides in length.

[0316] In some embodiments, two or more ASOs with different chemistries but complementary to the same targeted portion of the ASCE-containing pre-mRNA are used. In some embodiments, two or more ASOs that are complementary to different targeted portions of the ASCE-containing pre-mRNA are used.

[0317] In some embodiments, the antisense oligonucleotides of the disclosure are chemically linked to one or more moieties or conjugates, e.g., a targeting moiety or other conjugate that enhances the activity or cellular uptake of the oligonucleotide. Such moieties include, but are not limited to, a lipid moiety, e.g., as a cholesterol moiety, a cholesteryl moiety, an aliphatic chain, e.g., dodecandiol or undecyl residues, a polyamine or a polyethylene glycol chain, or adamantane acetic acid. Oligonucleotides comprising lipophilic moieties and preparation methods have been described in the published literature. In embodiments, the antisense oligonucleotide is conjugated with a moiety including, but not limited to, an abasic nucleotide, a polyether, a polyamine, a polyamide, a peptide, a carbohydrate, e.g., N-acetylgalactosamine (GalNAc), N-Ac-Glucosamine (GluNAc), or mannose (e.g., mannose-6-phosphate), a lipid, or a polyhydrocarbon compound. Conjugates can be linked to one or more of any nucleotides comprising the antisense oligonucleotide at any of several positions on the sugar, base or phosphate group, as understood in the art and described in the literature, e.g., using a linker. Linkers can include a bivalent or trivalent branched linker. In embodiments, the conjugate is attached to the 3′ end of the antisense oligonucleotide. Methods of preparing oligonucleotide conjugates are described, e.g., in U.S. Pat. No. 8,450,467, “Carbohydrate conjugates as delivery agents for oligonucleotides,” incorporated by reference herein.

[0318] In some embodiments, the nucleic acid to be targeted by an ASO is a PKD1, ABCA4, FUS, CEL, or NSD1 ASCE-containing pre-mRNA expressed in a cell, such as a eukaryotic cell. In some embodiments, the term “cell” may refer to a population of cells. In some embodiments, the cell is in a subject. In some embodiments, the cell is isolated from a subject. In some embodiments, the cell is ex vivo. In some embodiments, the cell is a condition or disease-relevant cell or a cell line. In some embodiments, the cell is in vitro (e.g., in cell culture).

### Pharmaceutical Compositions

[0319] Pharmaceutical compositions or formulations comprising the agent, e.g., antisense oligonucleotide, of the described compositions and for use in any of the described methods can be prepared according to conventional techniques well known in the pharmaceutical industry and described in the published literature. In embodiments, a pharmaceutical composition or formulation for treating a subject comprises an effective amount of any antisense oligomer as described herein, or a pharmaceutically acceptable salt, solvate, hydrate or ester thereof. The pharmaceutical formulation comprising an antisense oligomer may further comprise a pharmaceutically acceptable excipient, diluent, or carrier.

[0320] Pharmaceutically acceptable salts are suitable for use in contact with the tissues of humans and lower animals without undue toxicity, irritation, allergic response, etc., and are commensurate with a reasonable benefit/risk ratio. (See, e.g., S. M. Berge, et al., J. Pharmaceutical Sciences, 66: 1-19 (1977), incorporated herein by reference for this purpose. The salts can be prepared in situ during the final isolation and purification of the compounds, or separately by reacting the free base form with a suitable organic acid. Examples of pharmaceutically acceptable, nontoxic acid addition salts are salts of an amino group formed with inorganic acids such as hydrochloric acid, hydrobromic acid, phosphoric acid, sulfuric acid and perchloric acid or with organic acids such as acetic acid, oxalic acid, maleic acid, tartaric acid, citric acid, succinic acid or malonic acid or by using other documented methodologies such as ion exchange. Other pharmaceutically acceptable salts include adipate, alginate, ascorbate, aspartate, benzenesulfonate, benzoate, bisulfate, borate, butyrate, camphorate, camphorsulfonate, citrate, cyclopentanepropionate, digluconate, dodecylsulfate, ethanesulfonate, formate, fumarate, glucoheptonate, glycerophosphate, gluconate, hemisulfate, heptanoate, hexanoate, hydroiodide, 2-hydroxy-ethanesulfonate, lactobionate, lactate, laurate, lauryl sulfate, malate, maleate, malonate, methanesulfonate, 2-naphthalenesulfonate, nicotinate, nitrate, oleate, oxalate, palmitate, pamoate, pectinate, persulfate, 3-phenylpropionate, phosphate, picrate, pivalate, propionate, stearate, succinate, sulfate, tartrate, thiocyanate, p-toluenesulfonate, undecanoate, valerate salts, and the like. Representative alkali or alkaline earth metal salts include sodium, lithium, potassium, calcium, magnesium, and the like. Further pharmaceutically acceptable salts include, when appropriate, nontoxic ammonium, quaternary ammonium, and amine cations formed using counterions such as halide, hydroxide, carboxylate, sulfate, phosphate, nitrate, loweralkyl sulfonate and aryl sulfonate.

[0321] In some embodiments, the compositions are formulated into any of many possible dosage forms such as, but not limited to, tablets, capsules, gel capsules, liquid syrups, soft gels, suppositories, and enemas. In embodiments, the compositions are formulated as suspensions in aqueous, non-aqueous or mixed media. Aqueous suspensions may further contain substances that increase the viscosity of the suspension including, for example, sodium carboxymethylcellulose, sorbitol and/or dextran. The suspension may also contain stabilizers. In embodiments, a pharmaceutical formulation or composition of the present disclosure includes, but is not limited to, a solution, emulsion, microemulsion, foam or liposome-containing formulation (e.g., cationic or noncationic liposomes).

[0322] The pharmaceutical composition or formulation described herein may comprise one or more penetration enhancers, carriers, excipients or other active or inactive ingredients as appropriate and well known to those of skill in the art or described in the published literature. In embodiments, liposomes also include sterically stabilized liposomes, e.g., liposomes comprising one or more specialized lipids. These specialized lipids result in liposomes with enhanced circulation lifetimes. In embodiments, a sterically stabilized liposome comprises one or more glycolipids or is derivatized with one or more hydrophilic polymers, such as a polyethylene glycol (PEG) moiety. In some embodiments, a surfactant is included in the pharmaceutical formulation or compositions. The use of surfactants in drug products, formulations and emulsions is well known in the art. In embodiments, the present disclosure employs a penetration enhancer to effect the efficient delivery of the antisense oligonucleotide, e.g., to aid diffusion across cell membranes and/or enhance the permeability of a lipophilic drug. In some embodiments, the penetration enhancers are a surfactant, fatty acid, bile salt, chelating agent, or non-chelating nonsurfactant.

[0323] In some embodiments, the pharmaceutical formulation comprises multiple antisense oligonucleotides. In embodiments, the antisense oligonucleotide is administered in combination with another drug or therapeutic agent.

### Combination Therapies

[0324] In some embodiments, the ASOs disclosed in the present disclosure can be used in combination with one or more additional therapeutic agents. In some embodiments, the one or more additional therapeutic agents can comprise a small molecule. For example, the one or more additional therapeutic agents can comprise a small molecule described in WO2016128343A1, WO2017053982A1, WO2016196386A1, WO201428459A1, WO201524876A2, WO2013119916A2, and WO2014209841A2, which are incorporated by reference herein in their entirety.

### Treatment of Subjects

[0325] Any of the compositions provided herein may be administered to an individual. “Individual” may be used interchangeably with “subject” or “patient.” An individual may be a mammal, for example a human or animal such as a non-human primate, a rodent, a rabbit, a rat, a mouse, a horse, a donkey, a goat, a cat, a dog, a cow, a pig, or a sheep. In embodiments, the individual is a human. In embodiments, the individual is a fetus, an embryo, or a child. In other embodiments, the individual may be another eukaryotic organism, such as a plant. In some embodiments, the compositions provided herein are administered to a cell ex vivo.

[0326] In some embodiments, the compositions provided herein are administered to an individual as a method of treating a disease or disorder. In some embodiments, the individual has a genetic disease, such as any of the diseases described herein. In some embodiments, the individual is at risk of having a disease, such as any of the diseases described herein. In some embodiments, the individual is at increased risk of having a disease or disorder caused by insufficient amount of a protein or insufficient activity of a protein. If an individual is “at an increased risk” of having a disease or disorder caused insufficient amount of a protein or insufficient activity of a protein, the method involves preventative or prophylactic treatment. For example, an individual may be at an increased risk of having such a disease or disorder because of family history of the disease. Typically, individuals at an increased risk of having such a disease or disorder benefit from prophylactic treatment (e.g., by preventing or delaying the onset or progression of the disease or disorder). In embodiments, a fetus is treated in utero, e.g., by administering the ASO composition to the fetus directly or indirectly (e.g., via the mother).

[0327] Suitable routes for administration of ASOs of the present disclosure may vary depending on cell type to which delivery of the ASOs is desired. Multiple tissues and organs are affected by Dravet syndrome, with the brain being the most significantly affected tissue. The ASOs of the present disclosure may be administered to patients parenterally, for example, by intrathecal injection, intracerebroventricular injection, intraperitoneal injection, intramuscular injection, subcutaneous injection, or intravenous injection.

[0328] In embodiments, the antisense oligonucleotide is administered with one or more agents capable of promoting penetration of the subject antisense oligonucleotide across the blood-brain barrier by any method known in the art. For example, delivery of agents by administration of an adenovirus vector to motor neurons in muscle tissue is described in U.S. Pat. No. 6,632,427, “Adenoviral-vector-mediated gene transfer into medullary motor neurons,” incorporated herein by reference. Delivery of vectors directly to the brain, e.g., the striatum, the thalamus, the hippocampus, or the substantia nigra, is described, e.g., in U.S. Pat. No. 6,756,523, “Adenovirus vectors for the transfer of foreign genes into cells of the central nervous system particularly in brain,” incorporated herein by reference.

[0329] In some embodiments, the antisense oligonucleotides are linked or conjugated with agents that provide desirable pharmaceutical or pharmacodynamic properties. In embodiments, the antisense oligonucleotide is coupled to a substance, known in the art to promote penetration or transport across the blood-brain barrier, e.g., an antibody to the transferrin receptor. In embodiments, the antisense oligonucleotide is linked with a viral vector, e.g., to render the antisense compound more effective or increase transport across the blood-brain barrier. In embodiments, osmotic blood brain barrier disruption is assisted by infusion of sugars, e.g., meso erythritol, xylitol, D(+) galactose, D(+) lactose, D(+) xylose, dulcitol, myo-inositol, L(−) fructose, D(−) mannitol, D(+) glucose, D(+) arabinose, D(−) arabinose, cellobiose, D(+) maltose, D(+) raffinose, L(+) rhamnose, D(+) melibiose, D(−) ribose, adonitol, D(+) arabitol, L(−) arabitol, D(+) fucose, L(−) fucose, D(−) lyxose, L(+) lyxose, and L(−) lyxose, or amino acids, e.g., glutamine, lysine, arginine, asparagine, aspartic acid, cysteine, glutamic acid, glycine, histidine, leucine, methionine, phenylalanine, proline, serine, threonine, tyrosine, valine, and taurine. Methods and materials for enhancing blood brain barrier penetration are described, e.g., in U.S. Pat. No. 9,193,969, “Compositions and methods for selective delivery of oligonucleotide molecules to specific neuron types,” U.S. Pat. No. 4,866,042, “Method for the delivery of genetic material across the blood brain barrier,” U.S. Pat. No. 6,294,520, “Material for passage through the blood-brain barrier,” and U.S. Pat. No. 6,936,589, “Parenteral delivery systems,” each incorporated herein by reference.

[0330] In some embodiments, an ASO of the disclosure is coupled to a dopamine reuptake inhibitor (DRI), a selective serotonin reuptake inhibitor (SSRI), a noradrenaline reuptake inhibitor (NRI), a norepinephrine-dopamine reuptake inhibitor (NDRI), and a serotonin-norepinephrine-dopamine reuptake inhibitor (SNDRI), using methods described in, e.g., U.S. Pat. No. 9,193,969, incorporated herein by reference.

[0331] In some embodiments, subjects treated using the methods and compositions are evaluated for improvement in condition using any methods known and described in the art.

Methods of Identifying Additional ASOs that Promote Inclusion of an ASCE

[0332] Also within the scope of the present disclosure are methods for identifying or determining ASOs that promote inclusion of an ASCE in a processed mRNA that is processed from a pre-mRNA comprising the ASCE. Also within the scope of the present disclosure are methods for identifying or determining ASOs that promote inclusion of an ASCE of a PKD1, ABCA4, FUS, CEL, or NSD1 ASCE-containing pre-mRNA. Also within the scope of the present disclosure are methods for identifying or determining ASOs that promote inclusion of an ASCE in a processed mRNA that is processed from a pre-mRNA comprising the ASCE.

[0333] For example, a method can comprise identifying or determining ASOs that promote inclusion of an ASCE of a PKD1, ABCA4, FUS, CEL, or NSD1 ASCE-containing pre-mRNA. ASOs that specifically hybridize to different nucleotides within the target region of the pre-mRNA may be screened to identify or determine ASOs that improve the rate and/or extent of splicing of the target intron. In some embodiments, the ASO may block or interfere with the binding site(s) of a splicing repressor(s)/silencer. Any method known in the art may be used to identify (determine) an ASO that when hybridized to the target region of the exon results in the desired effect (e.g., exon inclusion, protein or functional RNA production). These methods also can be used for identifying ASOs that promote exon inclusion of the excluded exon by binding to a targeted region in an intron flanking the excluded exon, or in a non-excluded exon. An example of a method that may be used is provided below.

[0334] A round of screening, referred to as an ASO “walk” may be performed using ASOs that have been designed to hybridize to a target region of a pre-mRNA. For example, the ASOs used in the ASO walk can be tiled every 5 nucleotides from approximately 100 nucleotides upstream of the 3′ splice site flanking the ASCE (e.g., a portion of sequence of the intron located upstream of the target/ASCE) to approximately 100 nucleotides downstream of the 3′ splice site flanking the target/ASCE and/or from approximately 100 nucleotides upstream of the 5′ splice site flanking the ASCE to approximately 100 nucleotides downstream of the 5′ splice site flanking the target/ASCE (e.g., a portion of sequence of the intron located downstream of the target/ASCE). For example, a first ASO of 15 nucleotides in length may be designed to specifically hybridize to nucleotides −6 to −20 relative to the 3′ splice site flanking the target/ASCE. A second ASO may be designed to specifically hybridize to nucleotides −1 to −15 relative to the 3′ splice site flanking the target/ASCE. ASOs are designed as such spanning the target region of the pre-mRNA. In embodiments, the ASOs can be tiled more closely, e.g., every 1, 2, 3, or 4 nucleotides. Further, the ASOs can be tiled from 100 nucleotides downstream of the 5′ splice site, to 100 nucleotides upstream of the 3′ splice site. In some embodiments, the ASOs can be tiled from about 1000 or 500 nucleotides upstream of the 3′ splice site, to about 1000 or 500 nucleotides downstream of the 5′ splice site. In some embodiments, the ASOs can be tiled from about 1000 or 500 nucleotides upstream of the 3′ splice site, to about 1000 or 500 nucleotides downstream of the 3′ splice site.

[0335] One or more ASOs, or a control ASO (an ASO with a scrambled sequence, sequence that is not expected to hybridize to the target region) are delivered, for example by transfection, into a disease-relevant cell line that expresses the target pre-mRNA (e.g., a ASCE-containing pre-mRNA described herein). The exon inclusion effects of each of the ASOs may be assessed by any method known in the art, for example by reverse transcriptase (RT)-PCR using primers that span the splice junction, as described in Example 3. An increase or presence of a longer RT-PCR product produced using the primers spanning the region containing the ASCE (e.g., including the flanking introns of the ASCE) in ASO-treated cells as compared to in control ASO-treated cells indicates that splicing out of the target ASCE has been reduced. In some embodiments, the exon inclusion efficiency, the ratio of unspliced to spliced pre-mRNA, the rate of splicing, or the extent of splicing may be modulated using the ASOs described herein. The amount of protein or functional RNA that is encoded by the target pre-mRNA can also be assessed to determine whether each ASO achieved the desired effect (e.g., enhanced functional protein production). Any method known in the art for assessing and/or quantifying protein production, such as Western blotting, Jess blotting, flow cytometry, immunofluorescence microscopy, and ELISA, can be used.

[0336] A second round of screening, referred to as an ASO “micro-walk” may be performed using ASOs that have been designed to hybridize to a target region of a pre-mRNA. The ASOs used in the ASO micro-walk are tiled every 1 nucleotide to further refine the nucleotide acid sequence of the pre-mRNA that when hybridized with an ASO results in exon inclusion (or reduced splicing of the ASCE).

[0337] Regions defined by ASOs that reduce splicing of the target exon are explored in greater detail by means of an ASO “micro-walk,” involving ASOs spaced in 1-nt steps, as well as longer ASOs, typically 18-25 nt.

[0338] As described for the ASO walk above, the ASO micro-walk is performed by delivering one or more ASOs, or a control ASO (an ASO with a scrambled sequence, sequence that is not expected to hybridize to the target region), for example by transfection, into a disease-relevant cell line that expresses the target pre-mRNA. The splicing-inducing effects of each of the ASOs may be assessed by any method known in the art, for example by reverse transcriptase (RT)-PCR using primers that span the ASCE, as described herein (see, e.g., Example 5). An increase or presence of a longer RT-PCR product produced using the primers spanning the ASCE in ASO-treated cells as compared to in control ASO-treated cells indicates that exon inclusion has been enhanced. In some embodiments, the exon inclusion efficiency, the ratio of unspliced to spliced pre-mRNA, the rate of splicing, or the extent of splicing may be modulated using the ASOs described herein. The amount of protein or functional RNA that is encoded by the target pre-mRNA can also be assessed to determine whether each ASO achieved the desired effect (e.g., enhanced functional protein production). Any method known in the art for assessing and/or quantifying protein production, such as Western blotting, Jess blotting, flow cytometry, immunofluorescence microscopy, and ELISA, can be used.

[0339] ASOs that when hybridized to a region of a pre-mRNA result in exon inclusion and increased protein production may be tested in vivo using animal models, for example transgenic mouse models in which the full-length human gene has been knocked-in or in humanized mouse models of disease. Suitable routes for administration of ASOs may vary depending on the disease and/or the cell types to which delivery of the ASOs is desired. ASOs may be administered, for example, by intrathecal injection, intracerebroventricular injection, intraperitoneal injection, intramuscular injection, subcutaneous injection, or intravenous injection. Following administration, the cells, tissues, and/or organs of the model animals may be assessed to determine the effect of the ASO treatment by for example evaluating splicing (e.g., efficiency, rate, extent) and protein production by methods known in the art and described herein. The animal models may also be any phenotypic or behavioral indication of the disease or disease severity.

[0340] Also within the scope of the present disclosure is a method to identify or validate an ASCE in the presence of an NMD inhibitor, for example, cycloheximide. An exemplary method is provided in Example 2.

### EXAMPLES

[0341] The present disclosure will be more specifically illustrated by the following Examples. However, it should be understood that the present disclosure is not limited by these examples in any manner.

### Example 1. Identification of NMD-Inducing Exon Inclusion Events in Transcripts by RNAseq Using Next-Generation Sequencing

[0342] Whole transcriptome shotgun sequencing is carried out using next generation sequencing to reveal a snapshot of transcripts produced by the genes described herein to identify ASCE inclusion events. For this purpose, polyA+ RNA from nuclear and cytoplasmic fractions of human cells is isolated and cDNA libraries are constructed using Illumina's TruSeq Stranded mRNA library Prep Kit. The libraries are pair-end sequenced resulting in 100-nucleotide reads that are mapped to the human genome (GRCh38/hg38 assembly).

### Example 2. Confirmation of ASCE via Cycloheximide Treatment

[0343] RT-PCR analysis using RNA extracts from DMSO-treated or cycloheximide-treated human and mouse cells and primers in exons (e.g., a forward primer complimentary to exon 7 and a reverse primer complimentary to exon 9) confirmed the presence of a band corresponding to an NMD-inducing exon exclusion event. Treatment of cells with cycloheximide to inhibit NMD can lead to an increase of the product corresponding to the NMD-inducing exon exclusion event in the cytoplasmic fraction. RT-PCR and quantification of the cassette exon of NSD1 RNA (exon 8: GRCh38/hg38: chr5 177238237:177238507) were conducted. Densitometry analysis of the bands on the image of the RT-PCR products was performed to calculate percent ASCE inclusion of total transcript. FIGS. 2A-2D depict confirmation of exemplary alternative splicing events of an ASCE in the NSD1 gene via cycloheximide treatment in various human cells, as well as confirmation of existence of non-productive NSD1 mRNA transcripts in cynomolgus monkey brain regions and human cortex. FIG. 2A depicts a schematic in which peaks corresponding to RNA sequencing reads were identified in exon 8 of NSD1 (GRCh38/hg38: chr5 177238237:177238507). FIG. 2B depicts gel images and a graph showing that cycloheximide treatment led to increase in the amount of non-productive mature NSD1 mRNA transcripts (processed NSD1 mRNA containing a premature termination codon rendering the transcript a target of NMD) in various human cells, including astrocytes, Schwann cells, HEK293 cells, SH-SY-5Y (neuroblastoma cell line) cells, and SK-N-AS (neuroblastoma cell line) cells. FIG. 2C depicts a gel image and a graph showing the existence of non-productive mature NSD1 mRNA transcript in various cynomolgus brain regions, including cortex, brain stem, hippocampus, and cerebellum. FIG. 2D depicts a gel image and a graph showing the existence of non-productive mature NSD1 mRNA transcript in human cortex.

### Example 3. Confirmation of ASCE Via Cycloheximide Treatment in Mice

[0344] RT-PCR analysis using total RNA from in vivo or ex vivo DMSO-treated or cycloheximide-treated mouse brain regions (cortex, deep structure, cerebellum and brain stem) and primers in exons (e.g., a forward primer complimentary to mouse exon 6 and a reverse primer complimentary to mouse exon 8) confirmed the presence of a band corresponding to an ASCE exclusion event (FIGS. 3A-3D). FIG. 3A depicts gel images showing that, in ex vivo cycloheximide- or DMSO-treated mouse brains, exclusion of an ASCE of mouse NSD1 (mouse exon 7, corresponding to human exon 8) leads to formation of a processed mRNA containing a premature termination codon rendering the transcript a target of NMD. FIG. 3B depicts graphs of the percentage of NMD (top) and fold-change (bottom) of the NMD event of the non-productive NSD1 mRNA product relative to NSD1 productive NSD1 mRNA product according to densitometry analysis of the bands from the gel images of FIG. 3A to calculate percent ASCE. The fold-change in the bottom panel of FIG. 3B was calculated as fold change in percentage NMD between DMSO- and cycloheximide-treated samples, i.e., the percentage NMD in cycloheximide-treated samples divided by the percentage NMD in the corresponding DMSO-treated sample for each indicated brain region. FIG. 3C depicts gel images showing that, in in vivo cycloheximide-treated mouse brains that were treated for 3 or 6 or 12 hours, exclusion of an ASCE of mouse NSD1 (mouse exon 7, corresponding to human exon 8) leads to formation of a processed mRNA containing a premature termination codon rendering the transcript a target of NMD. FIG. 3D depicts graphs of the percentage of NMD (left) and fold-change (right) of the NMD event of the non-productive NSD1 mRNA product relative to NSD1 productive NSD1 mRNA product according to densitometry analysis of the bands from the gel images of FIG. 3C to calculate percent ASCE. The fold-change in the right panel of FIG. 3D was calculated as fold change in percentage NMD between saline and cycloheximide-treated samples, i.e., the percentage NMD in cycloheximide-treated samples divided by the percentage NMD in the corresponding saline treated sample for each indicated brain region.

[0345] FIGS. 4A-4B depict confirmation of inclusion or exclusion an ASCE of mouse NSD1 (mouse exon 7, corresponding to human exon 8) in NSD1 mRNA products processed from NSD1 pre-mRNA in mouse brains via in vivo cycloheximide treatment. FIG. 4A depicts a gel image showing that, in in vivo cycloheximide-treated mouse brains, exclusion of an ASCE of mouse NSD1 (mouse exon 7, corresponding to human exon 8) leads to formation of a processed mRNA containing a premature termination codon rendering the transcript a target of NMD. FIG. 4B depicts graphs of the percentage of NMD (left) and fold-change (right) of the NMD event of the non-productive NSD1 mRNA product relative to NSD1 productive NSD1 mRNA product according to densitometry analysis of the bands from the gel images of FIG. 4A to calculate percent ASCE. The fold-change in the right panel of FIG. 4B was calculated as fold change in percentage NMD between saline and cycloheximide-treated samples, i.e., the percentage NMD in the 60 mg/kg or 120 mg/kg cycloheximide-treated samples divided by the percentage NMD in the corresponding saline treated samples.

### Example 4. ASCE Region ASO Walk

[0346] An ASO walk can be performed for ASCE region targeting sequences upstream of the canonical 3′ splice site, across the 3′splice sited, the skipped exon (exon 8 for instance), across the 5′ splice site, and downstream of the 5′ splice site using 2′-MOE ASOs, PS backbone. ASOs can be designed to cover these regions by shifting 5 nucleotides at a time or by shifting any predetermined number of nucleotides at a time. In some embodiments, ASO walk can be performed for ASCE region targeting sequences that are not across the 3′splice site and/or not across the 5′ splice site. FIG. 5 depicts an exemplary ASO walk for an exemplary ASCE region. The shaded nucleotides in FIG. 5 correspond to the exon skipping event and arrows point to canonical splice sites.

### Example 5. ASCE Region ASO Walk Evaluated by RT-PCR

[0347] ASO walk sequences can be evaluated by for example RT-PCR. PAGE can be used to show SYBR-safe-stained RT-PCR products of mock-treated or ASO-treated cells targeting the ASCE regions as described herein at 20-NM concentration in human/mouse cells by gymnotic uptake. Products corresponding to exon exclusion and full-length can be quantified and percent MD can be plotted. Full-length products can be normalized to internal controls.

[0348] In one experiment, HEK293 cells were transfected for 24 hours with exemplary ASOs according to some embodiments of the present disclosure at an 80-nM concentration. FIG. 6A shows a graph summarizing the changes in the level of productive NSD1 mRNA in one ASO walk around the cassette exon (exon 8). FIG. 6B shows a graph summarizing the changes in the level of non-productive NSD1 mRNA in one ASO walk around the cassette exon (exon 8).

[0349] In another experiment, ASO micro-walk was conducted by nucleofecting SH-SY-5Y cells for 24 hours with exemplary ASOs according to some embodiments of the present disclosure at a 5 mM concentration. FIG. 7A shows a graph summarizing the changes in the level of productive NSD1 mRNA in one ASO walk around the cassette exon (exon 8). FIG. 7B shows a graph summarizing the changes in the level of non-productive NSD1 mRNA in one ASO walk around the cassette exon (exon 8).

### Example 6. NSD1 ASCE Region Vectorized ASO Walk

[0350] An ASO walk can be performed for ASCE region targeting sequences upstream of the canonical 3′ splice site, across the 3′ splice site, the skipped exon (exon 8 for instance), across the 5′ splice site, and downstream of the 5′ splice site to identify vectorized ASOs that can prevent a non-productive AS event (e.g., promote inclusion of an ASCE in a processed mRNA), a systematic vectorized ASO walk can be performed in 5-nt or 2-nt steps along the AS event of interest. These vectorized ASOs can be expressed from a vector as a modified U1 snRNA or U7 snRNA, which contains an ASO sequence as its targeting sequence. FIG. 8 shows a systematic vectorized ASO walk along the AS event of NSD1 pre-mRNA for a vectorized ASO that is expressed as a modified U7 snRNA. FIG. 9 shows a systematic vectorized ASO walk along the AS event of NSD1 pre-mRNA for a vectorized ASO that is expressed as a U1 snRNA. RT-PCR analysis from transfected cell lines can identify several vectorized ASOs that lead to reduced AS (e.g., promote inclusion of an ASCE in a processed mRNA) in the NSD1 mRNA and increase in productive mRNA. The observed increase in NSD1 productive mRNA can be confirmed by TaqMan qPCR. The fold change of AS may be plotted against the increase in productive mRNA (as measured by qPCR) to demonstrate that the vectorized ASOs are mechanistically functioning.

### Example 7. NSD1 Non-Productive mRNA Levels in Various Cell Lines

[0351] Alternative NMD inhibitors (i.e., non-ASOs) were tested in different cell lines to assess the baseline differences in non-productive RNA levels across various cell types.

[0352] The cell lines used were SH-SY5Y, U-87 MG, HEK293, and SK-N-AS. SH-SY5Y is a subcloned cell line from a neuroblastoma cell line originating from metastatic bone tumors. U-87 MG is a cell line isolated from malignant gliomas displaying epithelial morphology. Human Embryonic Kidney (HEK) 293 is a cell line routinely used for basic biotechnology research. SK-N-AS cells are human neuroblasts originating from neuroblastoma cells.

[0353] The NMD inhibitors tested include SMG1 Nonsense-Mediated MRNA Decay Associated PI3K Related Kinase inhibitor (SMG1i) and cycloheximide (CHX). SMG1i is an inhibitor of nonsense-mediated mRNA decay (NMD) regulator SMG1 and was originally designed to target multiple myeloma. SMG1i was used as an NMD inhibitor and tested alongside CHX, a standard mRNA translation inhibitor also known to inhibit NMD. The effects of NMD inhibitors were measured in different cell lines to determine whether cell lines had different baseline levels of non-productive RNA, interpreted to be equivalent to NMD events. Each of the four cell lines (SH-SY5Y, U-87 MG, HEK293, and SK-N-AS) was incubated with a negative control (mock) and NMD inhibitors (CHX at a final concentration of 50 μg/ml and SMG1i at a final concentration of 1 μM), respectively, for three hours to evaluate the baseline levels of non-productive NSD1 mRNA (FIG. 10). After treatment with either water-only mock control, CHX, or SMG1i, cells from each cell line were harvested, and RNA was extracted and quantitated. Treatment with SMG1i resulted in ˜28% NSD1 non-productive mRNA (percentage of the level of non-productive NSD1 mRNA transcript in the total level of all NSD1 mRNA transcripts) in U-87 MG cells, ˜19% NSD1 non-productive mRNA levels in SH-SY5Y cells, and <˜18% NSD1 non-productive mRNA levels in HEK293 and SK-N-AS cells. Treatment with CHX resulted in ˜23% NSD1 non-productive mRNA in SH-SY5Y cells, ˜15% NSD1 non-productive mRNA in U-87 MG cells, and ˜13% NSD1 non-productive mRNA in HEK293 and SK-N-AS cells. In cells treated only with water (mock), the percentage of non-productive RNA remained low.

### Example 8. Effects of Exemplary Chemically Modified ASOs

[0354] The effect of ASOs with modified backbone chemistry in U-87 MG cells was determined. U-87 MG cells were treated either with (1) ASOs that had phosphorodiamidate morpholino (PMO) modifications, or (2) ASOs that had 2′-O-methoxyethyl modifications and phosphorothioate backbones (2′MOE-PS) (FIG. 11A, Table 6).

[0355] NSD1 mRNA levels were assessed 24 hours after nucleofecting U-87 MG cells with either 2 μM ASOs with PMO modifications or 1 μM ASOs with 2′MOE-PS modifications, and the fold change was quantitated for productive and non-productive mRNA transcripts compared to mock controls (FIG. 11B). All results are normalized to the mock controls. PMO-containing ASO 1749 corresponds in sequence to 2′MOE-PS-containing ASO 1752. Both chemically modified ASO 1749 and ASO 1752 resulted in at least about a 1.1-fold increase in productive NSD1 mRNA compared to mock controls. ASO 1749 resulted in a decrease to about 0.4-fold of non-productive NSD1 mRNA and ASO 1752 resulted in a decrease to about 0.3-fold of non-productive NSD1 mRNA compared to water-only mock controls. PMO-containing ASO 1750 corresponds in sequence to 2′MOE-PS-containing ASO 1754. PMO-containing ASO 1750 resulted in at least about 1.2-fold increase in productive NSD1 mRNA and decreased non-productive NSD1 mRNA to about 0.3-fold compared to mock controls. 2′MOE-PS-containing ASO 1754 resulted in at least about 1.1-fold increase in productive NSD1 mRNA and decreased non-productive NSD1 mRNA to about 0.2-fold compared to mock controls. PMO-containing ASO 1751 corresponds in sequence to 2′MOE-PS-containing ASO 1755. PMO-containing ASO 1751 resulted in at least 1.2-fold increase in productive NSD1 mRNA and decreased non-productive NSD1 mRNA to about 0.3-fold compared to mock controls. 2′MOE-PS-containing ASO 1755 resulted in no change in productive NSD1 mRNA but decreased non-productive NSD1 mRNA to about 0.3-fold compared to mock controls. 2′MOE-PS-containing ASO 1753 resulted in at least about 1.2-fold increase in productive NSD1 mRNA and decreased non-productive NSD1 mRNA to about 0.3-fold compared to mock controls. In general, productive NSD1 mRNA levels increased and non-productive NSD1 mRNA decreased relative to mock controls when cells were treated with either 2 μM ASOs with PMO modifications or 1 M ASOs with 2′MOE-PS modifications.

[0356] NSD1 protein levels were assessed 72 hours after nucleofecting U-87 MG cells with either 2 μM ASOs with PMO modifications or 1 μM ASOs with 2′MOE-PS modifications and compared to mock controls (FIG. 11C). All results are normalized to the mock controls. 2′MOE-PS-containing ASO 1752 resulted in at least about a 1.3-fold increase in NSD1 protein compared to mock controls. PMO-containing ASO 1750 resulted in at least about a 1.1-fold increase in NSD1 protein compared to water-only mock controls. 2′MOE-PS-containing ASO 1754 resulted in at least about a 1.2-fold increase in NSD1 protein compared to mock controls. PMO-containing ASO 1751 resulted in at least about a 1.2-fold increase in NSD1 protein compared to mock controls. 2′MOE-PS-containing ASO 1755 resulted in at least about a 1.1-fold increase in NSD1 protein compared to mock controls. 2′MOE-PS-containing ASO 1753 resulted in at least about a 1.2-fold increase in NSD1 protein compared to mock controls. In general, NSD1 protein levels increased relative to mock controls when cells were treated with either 2 μM ASOs with PMO modifications or 1 μM ASOs with 2′MOE-PS modifications. As such, the effect of MOE-PS ASO hits translates to (i.e., behaves similarly to) ASOs with alternative backbones such as those modified with PMO.

TABLE 6
Exemplary ASOs with Modified
Backbone Chemistry

| | | | SEQ ID |
|---|---|---|---|
| ASO Name | Chemistry | Sequence | NO: |
| ASO 1749 | PMO | TTCCTCTAATCATATCTG | 1768 |
| ASO 1750 | PMO | TTCCTCTAATCATATCTGCT | 1769 |
| ASO 1751 | PMO | GCTTCCTCTAATCATATCTG | 1770 |
| ASO 1752 | 2′MOE PS | TTCCTCTAATCATATCTG | 1771 |
| ASO 1753 | 2′MOE PS | TTCCTCTAATCATATCTGC | 1772 |
| ASO 1754 | 2′MOE PS | TTCCTCTAATCATATCTGCT | 1773 |
| ASO 1755 | 2′MOE PS | GCTTCCTCTAATCATATCTG | 1774 |

### Example 9. Upregulation of NSD1 Protein by Exemplary ASO Resulted in Globally Elevated H3K36me2 Levels

[0357] H3K36me2 is an epigenetic modification on Histone H3, and NSD1 is a histone methyltransferase that can mediate the dimethylation of Histone H3 at residue K36 (H3K36me2). NSD1-mediated H3K36me2 can contribute to the recruitment of DNA methyltransferases and the maintenance of DNA methylation at intergenic regions. Thus, levels of H3K36me2 were examined to determine whether the upregulation of NSD1 protein by ASOs would facilitate the elevation of H3K36me2 levels in U-87 MG cells. All results in this Example comprise data drawn from 2-3 independent experiments and all results for each assay are normalized to the water-only controls, mean±SEM.

[0358] ASOs were evaluated in U-87 MG cells to assess their potency in elevating NSD1 protein expression and H3K36me2 levels. U-87 MG cells were nucleofected with 1 M of one of four exemplary ASOs (ASO 214, ASO 210, ASO 211, or ASO 215) and harvested 72 hours after nucleofection. NSD1 protein levels for each of the four exemplary ASOs were measured by immuno-capillary electrophoresis (JESS) and compared with water-only controls (FIG. 12A). NSD1 protein levels were higher than the water-only controls when U-87 MG cells were treated with ASO 210, ASO 211, or ASO 215, while NSD1 protein levels were slightly lower than those of water-only controls when U-87 MG cells were treated with ASO 214. Treatment with ASO 210 resulted in about a 1.25-fold increase in NSD1 protein levels. Treatment with ASO 211 resulted in about a 1.3-fold increase in NSD1 protein levels. Treatment with ASO 215 resulted in about a 1.15-fold increase in NSD1 protein levels. Treatment with ASO 214 resulted in a decrease in NSD1 protein levels to about 0.96-fold of the water-only controls.

[0359] Cellular H3K36me2 levels, as measured by AlphaLISA® assay, were elevated after treatment with all four ASOs (FIG. 12B). H3K36me2 levels were about 1.41-fold higher in cells treated with ASO 214. When compared to H3K36me2 levels in cells treated with water only, H3K36me2 levels were about 1.39-fold higher in cells treated with ASO 210, about 1.38-fold higher in cells treated with ASO 211, and about 1.35-fold higher in cells treated with ASO 215. Considered together, the four ASOs tested were found to both increase NSD1 protein levels and elevate cellular H3K36me2 levels in U-87 MG cells.

### Example 10. ASO 211 Resulted in a Dose-Dependent Increase of Global H3K36me2

[0360] ASO 211 was evaluated further to determine whether changes in dosage would affect NSD1 protein expression and H3K36me2 levels in U-87 MG cells.

[0361] U-87 MG cells were nucleofected with one of four doses (0.25 μM, 0.5 μM, 1.0 μM, or 2.0 μM) of a hit ASO (ASO 211) or a water-only control. Cells were harvested 72 hours after nucleofection and their NSD1 protein, H3K36me2, and total Histone 3 (H3) levels were quantitated. All results in this Example comprise data drawn from 2-3 independent experiments and all results for each assay are normalized to the water-only controls, mean±SEM; one-way ANOVA; * pval<0.05, ***pval<0.01; ****pval<0.001.

[0362] NSD1 protein levels were measured by immuno-capillary electrophoresis (JESS). NSD1 protein levels were higher than the water-only controls at all tested concentrations of ASO 211 (FIG. 13A). In particular, a 0.25-μM concentration of ASO 211 resulted in about a 1.1-fold increase, 0.5 μM resulted in about a 1.2-fold increase, 1.0 μM resulted in about a 1.4-fold increase, and 2.0 μM resulted in about a 1.1-fold increase of NSD1 protein levels relative to the water-only controls. Treatment of U-87 cells with 1.0 μM of ASO 211 yielded the highest-fold increase (about 1.4-fold) of NSD1 protein relative to the remaining three concentrations of ASO. Treatment of U-87 cells with 0.5 μM of ASO 211 yielded the second highest-fold increase (about 1.2-fold) of NSD1 protein relative to the three other concentrations of ASO. Treatment of U-87 cells with either the highest or the lowest concentrations (0.25 μM and 2.0 μM) of ASO 211 yielded the smallest-fold increase (about 1.1-fold) of NSD1 protein relative to the other tested mid-level concentrations of ASO.

[0363] Cellular H3K36me2 levels, as measured by AlphaLISA® assay, were elevated after treatment with all tested concentrations of ASO 211 (FIG. 13B). H3K36me2 levels increased about 1.3-fold in cells treated with 1.0 μM of ASO 211 compared to those treated with water only. H3K36me2 levels were about 1.1-fold higher than in water-only cells when the cells were treated with ASO 211 concentrations of either 0.25 μM or 0.5 μM. H3K36me2 levels were about 1.2-fold higher than in water-only cells, when the cells were treated with 2.0 μM of ASO 211. Lower dosage concentrations of the ASO generally resulted in a smaller-fold change in cellular H3K36me2 levels.

[0364] To rule out the possibility that the effects observed on NSD1 protein expression and H3K36me2 levels were due to changes in cellular levels of Histone H3, total H3 levels were also measured by AlphaLISA® assay (FIG. 13C). Histone H3 levels were found to be approximately the same across all experimental conditions, whether water or any concentration of ASO 211 was used. As such, the modulation of NSD1 protein expression and H3K36me2 levels by ASO 211 were likely not caused by changes in total Histone H3 levels, but rather, by the presence of the ASO itself and the experimental concentrations tested. In summary, ASO 211 was found to increase global H3K36me2 levels in a dose-dependent manner.

[0365] While preferred embodiments of the present disclosure have been shown and described herein, it will be obvious to those skilled in the art that such embodiments are provided by way of example only. Numerous variations, changes, and substitutions will now occur to those skilled in the art without departing from the disclosure. It should be understood that various alternatives to the embodiments of the present disclosure may be employed in practicing the present disclosure. It is intended that the following claims define the scope of the present disclosure and that methods and structures within the scope of these claims and their equivalents be covered thereby.

The application's sequence listing, which the Patent Office published only in electronic form, follows.

SEQUENCE LISTING (1780 sequences)

SEQ ID NO: 1 - DNA, 47191 bp, Homo sapiens
  source 1..47191: mol_type = genomic DNA
gcactgcagcgccagcgtccgagcgggcggccgagctcccggagcggcctggccccgagccccgagcgggcgtcgctcagcagcaggtcgcggccgcagccccatccagccccgcgcccgccatgccgtccgcgggccccgcctgagctgcggcctccgcgcgcgggcgggcctggggacggcggggccatgcgcgcgctgccctaacgatgccgcccgccgcgcccgcccgcctggcgctggccctgggcctgggcctgtggctcggggcgctggcggggggccccgggcgcggctgcgggccctgcgagcccccctgcctctgcggcccagcgcccggcgccgcctgccgcgtcaactgctcgggccgcgggctgcggacgctcggtcccgcgctgcgcatccccgcggacgccacagcgctgtgagtagcgggcccagcggcacccgggagaggccgcgggacgggcgggcgtgggcgcgttccctggcccgggacgggaagcaggacgcgggccaggacgctcccagggcgaggctccggcgcggcacggcggccctgctaaataaggaacgcctggagccgcggttggcacggccccggggagccgaaaaaccccgggtctggagacagacgtcccacccgggggctctgcagacgccagcgggggcggggcgcggaggccgcgctcagctgggaggacaaacagtcgctaattggagaggaattgggatgcggcctggggctgcggggtacccggagaggtggggatggctgtagggggcggcagggaagagttccaggaggtgtctggaaaaggatttgatggatgtgcaagaattgggctgatgcttaggaaggggcgatgaggtgggtccagaagaaggggggtgaacggtgtgagcaaagaccgtgaggctggaggctggccacgggaggtgtgaggggtaggggcagggtgggaggtgggctcgcgggtgggctggggtcatgaagggcctcaggcgctctgctattgggttccaaggctatcctgagaacaggggtgaggggggattgccgtggggggttaaagccttgtcatgttcgctttcgggagataaaaacaacaggtggcctttatggagacgctgcccagagccaggtctgtgccaggctcctgttgggggtcgtcatgcggaatcctgactctgaccatccgaggcatagggaccgtggagatttgcatttcacagatgaggaaacaggtttggagaggtgacacgacctgtcccaggcatcacagccgggatgtgcatagcaggggtttggaactatgaggtgcccaggacccagggttggattgaaaagggcggaggggactaagataagcagacagttgtccccagcgctggggagagtcttgggaccagtctgatgccttgtatttcccaggctccaggctcctcgccgggacagtgtctccttgggtgcgtgctggatccctgggggacgtggcacatccccaggcttgctaaacattgggtgggttctggcatttggttttgtaacgtttctgggtcactcccgcctgtggccacccttccttaggggagccgtgtgtccttggggctttgctgggtggtctcgagggtgggagaagaatgggttctcctggaccaatggagcccgtgcccctcggggccacattgctcctgcgctccctgactgcggacgcgtgtgtctcgcggctgtctctgtggagatggcctcctcctgcctggcaacagcacccacagaattgcatcagacctaccccacccgttgtttgtgatgctgtagctgagggctcctctgtctgccaggccggtcactggggactctgtccagggcctggtggttcctgcttcccagcacctgatggtgtccatgagagcagcccctcaggagctgtccgggagagaagggcgctggtggctgctgagcggagagcaaggcccgtgttctccaggcccttggcacagcagtggagcccccgcccctgccttgtgttgtcctcttaggctctggtcctggggtttggaggagggggaccctgggagttggtggcctgtcccagcctgagctggcaagattccgaatgccaggccccccaagtgtgcaacagggcacagggtgacctcatgtgggcaggtgggtgctgttctgtacacacctggggccgccgctgggagagttctggaaggtggggtgaggggacccatggcaaactagggccttaggaaggatgtgaaggccctggctggccccccaggccaccctctgtgctgtggggcagcccagccattttgctgtctaccctgcaaactcctcctcggggagacggctgggttttccccagggaagaggggtcaagctgggagaggtgaaggacacagatcacagctgctggcaggtgttcaagggtccaagagcgttgctgtctgggtgtcaccagtagccttcctggggggctcacgcaggtgcctctccacttgtggctccctggctgctgaagctcagcagggacagctgtgtccagttccaggtggaggacagccggggcttctgaggccacagcctgccttgggttaatgatgctgccgagaggtggtggcttttggaaaagatggcgtactgcaaaacgtgctgctctgcgtggctcgaagcttcgtggggagacgtgggcagagccgtggctgactcacagaccccccaccccagagcctgccctgccctccctgccccgacccttctccctcctgacccatgtgttttttttttttttttttttttttgagacagagttcactcttgttgccaaggctggagtgcaatggcacgatctcggctcatggcaacctccgcctcctgggttcaagcgctttttcctgcctcagcctcccgagtagctgggattacaggcgtgcaccaccatgcctggctaattttgtatttttagtagagacagggtttctccatattggtcaggctggtcttgaactcctgacctcagatgatccgcccgcctcggcctcccaaagtgctgggattacaggcatgagccaccacgcccagccctgacccatgttttgaaccaaattccagccacccttttatctgcaagcattttggagggcatcgcaatactgcagacccacctaacacaacagacagttccttcatgccaccgaaggcctggtgtgttcacatttttggtttaatagtttgaattaagagccaaataaggtccacacactgcaattagttgatgtctttttttttttctttttttttttttttttgagacggagtcttgctcttgtctccaggccgcagtgcagtggcatgatctcagctcaccgcaacctccgactccctggttcaagcgattctcctgcctcagcctcccgagtacctggtagctgggtttacaggcatgcaccaccgtgcccagctaatttttgtatttttagtagagacggggttttactgtgttggccaggatggtctcgatctcctgacctcgtgatctgcccacctcggcctcccaaagtgctgggattacaggcgtgagccaccgcacccggccaatgtcttttaaaaatatatactttttttttttttttgagacggagtttcgctcttgttgcccaggctggagtgcagtggcgcgatctcacctcacggcaacctccgcctcccgggttcaagtgattctcctgcctcagcctctccagtagctgggattacaggcatgtgccaccatgcctggctaattttgtatttttaggagagacggggtttctccacgttggtcaggctggtctcaaactcctgacctcaggtgatccgcctgccttggcctcccaaagtgttgggattacaggtgtgagccaacgcgcccagacaaaaatatatgtgtgtctttaaggctggtcaagcaaagcagtaggactggagaaagaatgaagaattctacctggctgtgatcaattcgttgtgaacaccactgtgcttggaccagctagctgatgtcttttgttttgttttgtttgagacggagtctggctctgtcacccaggctggaggacaatggtgtgatctcggctcactgcagcctccatctcccgggttcaagcgattctcctgcctcagcctcctgagtagctgggattagaggcgcgcgccaccacgcccggctaatttttaaaaatatttttagtagagatggggtttcaccatgttggtcaggctggtcttgaactcttggccttaggtgatctgcttgcctcggcctcccaaagtgctgggattacaggtgtgagtgatgtattttatttatttatttatttatttatttttattatttgagatggagtctcactctgttgcccaggctggagtgcagcagtgccatctcagctcactgcaagctccgcctcctgggttcacgccattctcctgcctcagcctcctgagtagcctggactggtgcccgccaccatgcccagctaattttttgtatttttagtagagacggggtttcaccgtgttagccaggatggtctggatctcctgacctcgtgatcctcccgcctcagcctcccaaagtgctgggattacaggcttgagccaccgcctgtcttttaaatgtccgatgatgtctaggagcttcccttcctctctttttccttgtgcaatttgttgaagaaactggctcctgcagcctggatttctcgctgtgtcttgggggtgccacctccatggtgtcacctccgtggtgctgtgagtgtgtgctttgtgtttcttgtaaattggtcgttggagccgacatcccattgtcccagaggttgtcctggctggcactggcctaggtgtagatgtcatcagctcagggccccctgctctaaaggccacttctggtgctggttgccactcaccctggctgggggtcacctgggtctgctgctgtctcgcaaatgctggggtccaggactgggcacatcgagggacttggtaggtgcttggttcactgatgtaaaatataggagcacccggggccttgccctttcccacctgcatccctgaatgacaggagagtgtgggagagtgtagggacagcaggcgcagaccccggggcccctgcctgggattggcgtcggggaagacaggcattctggagcgacccctaggcctgatgccttagagcgcaactgccagagacacagcttccttggggggctggccaggccacggaggggcccctggctcccatttctggtccctggatcctgagagcgaggactagggattgtcaccaaggcctccatgagccctcagcagaaggagggccaccctcgagggctccgttatcactggagcccgcgttcaaccaacacgcagatgattctccaaggacagagatggatgatggggagggggctggcctggaaggacccccagtgcaggtgacattgaagccaggtttcaaagctcccacagggagctgcccagagagagtccccaaggggcaaggtgactcgggggcaggggtagggcctctgtcaggagagcctaggagaggcctgtgtcttctaggaagagccctggcagccgagcggaggcagtggtgaggacctgcatcctgcatgtccagctggcctcacccggggtccctgagccgggtcttacgtggctcccgcactcgggcgttcagaacgtgcctgcgtgagaaacggtagtttctttattagacgcggatgcaaactcgccaaacttgtggacaaaaatgtggacaagaagtcacacgctcactcctgtacgcgattgccggcaggggtgggggaagggatggggaggctttggttgtgtctgcagcagttgggaatgtggggcacccgagctcccactgcagaggcgactgtggagacagagagcacctgcaggtcatccatgcagtatcggcttgcatccagatcatacagggaacactatgattcaacaacagacagggaccccgtttaaacatggacaaggggtcactcacgcctggaatcccagcagtttgggaggccagggtgggtggatcgcttgagcccaggagtttgacaccagcctgggcaacagggtgagaccccggtctctaaaaaataaaagaacattggccgggcgtggtggtatgcatctgtggtcccagctattcaggagactgaggtgggacatcacttgagccgaggaggtcaaggctgcagtgagctgtgatcacaccactgcactccaggctgggtcacagagcaagaccctgtctcaaaaaaaaaaaaaaaaaaaaaaaaaaatcacaggatctgaacagagatttctccaaagaagacgcacagatggccaacagcgtgtgagaagatggtcggcctcattagtcatgagggaaacgtaaatcaaaaccactgtccagccgggcgcggtgcctcacgcctgtaatcccagcactttaggagagcagatggcttgaggccaggagtttgaggccagcctgggcaacatagcgagaccaataaatagatattagtggtggcgcctgtagtcccagctagttgggaggctgaggggggaggattccctgagtctatgaggttgagactgcagttagctgtgatggtgccactgcactccagcctgggcgactaggaaacggtctttaaaaaaaaaaaaaaaaaacagggtgggcgcggtggttcacgcctgtaatctcagcactttgggaggccaaggtggggggatcacaaggtcaggagtttgtgaccagcctgaccaacatggtgaaaccccgttctactaaaaatacaaaaattagcgaggtgtggtcgtgggcgcctgtaatcccagctaattaggaggctgaggcaggagaatcacttgaacccgggaggcggaggttgcagtgagccaatatcacaccactgcactctagcctggtcaacagagcgagactctgtctcaaaaaaaaaaaatgctgagcgtggtggcgcatgcctgtagtctcagctactttgggggctgaggcaggagaatcgcttgaacctgggaggcagaggtcgcagtgaggcaagattgcaccattgcactccagcctgggagacagagtgaaactctgtctcaaaaagaaaaggtctaggaagagtccgcaccctctccccgcggtggccacgccgggctccgcgctgagccctctgtgttcttgtctctccatacctcatcacggcaccgcagggttgcagccactcctggtctcattttacacaccaggaaattgaggctctttgagaagccgtggtgatgatttcatcagcatgctctggggcagacccctgcagccgcacagggtgcctggggcccacactagtgccctggtttatagacagacagaggtggcagtggcgcttccgagtcgggctgcgatgtgcttgcactccccgaggggctgaggggccctgcgcccaggtgcagctgcttgggtgctgccagcccctcccacctctccctccctgccagcccctcccacctctccctccctgccagcccctcccacctctccctccctgccagcccctcccacctctccctccctgccagcccctcccacctctccctccctgccagcccctcccacctctccctccctgccagcccctcccacctctccctccctgccagcccctcccacctctccctccctgccagcccctcccacctctccctccctgccagcccctcccacctctccctccctccagcccctcccacctctccctccctgccagcccctcccacctctccctccctgccagcccctcccacctctccctccctgccagcccctcccacctctccctccctgccagcccctcccacctctccctccctgccagcccctcccacctctccctccctgccagcccctcccacctctccctccctggctcatccctgctgtgtcccttctctctagtttcctgttcagtttcaggaaggaggctgggaacccagatgtagggaatttgcgccctggagtcagacctgggttcacgtcccagcgcctccacctctggtgtgaccttggtccagtctctcagcctcagtttcctcacctgtaaagtgggctccatgattagatgcaccctgcagggcagtgtagcagtgacctggctcagccactggcagccccaacaatcataccttgttaaagtagctctgtcggttccctcaggggttccgggggcccattcccctgtcctccatgcactgtgagacctgccctgccacagagcagagtgtaacagcctgagggtgagagccagacactgtgcctgtgcttagaccagacactggacgacgggagccagtgcagcctgggcgggtggactcctatggacccctcagcacccagcctcggtgccttcagcgcagggccgcgtggctgtgggggctcacaagacccggcccactcctgcttgtgcctacatctgggtgtttgcccattggtgccttttgacgcgttctggtgtgtgtgagacgtgcggggctgggaagtgttggcagagccgcgagtaccgtcctcactccttttgttcttttgacgtaagctggcgagtggcactgcctgagttccgctcagtgcccgccctgatgtgcggaccccgctgcattcttgctgttaggtggtggcggtgtgcgctgtcgctggtgggcaccgagagtctttgggagctttggggaggttgtgccaagcctgagcctcgacgtcccccttcccggctttctgttggctcttctgaggccagggcatctctatgagggcctcctgctggagccgtctctgtggatctcctctgccatcctggcccatgagtgggtgatgcgctggccaccatctggtgacagtggccgggcaccgctgccaaatgtgggtcccgcatctgcaagcccctccctgggtcccctagggtatggggtggttctgccactgccctcgctcccccaccttggggtgcctctccccctgctcgtgggggagaccctgcctgggatctgctttccagcaaggaatatactttggagggagacacacatgttcttttctggagctctgcagtggccacggcagcccagcccgccaagcaccctggaatgaaaacatcccgctgctgtctgggcctggcctgcactctgctgcctgcgctccagctggctgaggccgggcacgtctgcgggcacagcagcgggggcgccacagtctccctgcagagtgagcgcagctggaaaatgcagctcacgccctttcccagaacacctcgctcttcatggcttggcagctgtccttgcctaggggccagggtgcccaggcactggtggcaggagaagggctacatctggggctgaggcgggctgggtccttttctccctgcagctcccgaggcccagccctggcccagcctggcattcctgaccttagcagcgccatgatctgaagacaggctggcttctgtgaggccacctcagaaagggctttgtgcccaggcagaggcggaagccagctcttccttctggttgaggcaggaatgaggccagcgctggggcaagcccatgcccagggaacgtcacagctgtgggagtacaggggctccgggttctgagcccgtccactgtgcatcgtggccctggcctcaggatggctcgtaccatcattggctgtgcccacagccgagtgggtgatgggattccggctgccccgctggatctgtgctgctgccctctccagggcactgctgtgcccgcacagccgggcgcagatggccagtttgcttgcccccccccccaccatcctcttcctaccttggcttcctccattgacacactggaccctgctggctgcccggggaggtgtttgggggatggtgttgggggaggaggagggccccttgagcctcagtgtgcccatcaggagcgtaaggtcagtgcagcacctgcccacacaggctgtgaagggtgggagtggagagggatgcaagggggtcacaacgcctggctccatgtcagctgcgtgcaggggcaccaggagccggccctcattctccccttgaactggaagggtggccccgaccccagcggcaggtagcatacgtatgaagcgctctccttcctacaccccacaggtgggctcgtctccagacggccctttttgagctggctgtgtttttccatctgtgtaggcaaggacatcgcagactcccctttctcatctccctcgttcagcctccgaggccggagtctccatccctgtgcctgcctgtgggtcccgggaggacctgaggctgcccatgtcacccccggcatctcatcctggggacagttcagccgtgggagggatctgtaaggacagaatgccgctgagcctggggctccccagctagtctcacaccccgtgtctgggacccagagaccctcgtgcagggctctgttgcttggggcctggcagcctcgtcctgtatcagaggctgccacccccacccctcgtggggccagggttgtggccggcctccctggccctccccatggaagtggtaggcggagccagcagccatctgcccagcccggggctgcactgttttttttcaaatgagcaccgtcccaaactgcagcccgttaatttaaacaggatcatttccggccctggaagccgcctcactctccttaaatagaaaggagcacagcgcagagggaaacagatgaggtcatggctcggctggcccagcgaggaaggggccgcagtgggggtggcactgccgcctgtcccctgtcctctccagcgcccacactgcagcccatttcctcaccctgggcctgctctcgggagggacgggcctgggggtcctcttgctgggcggaggggaaccagctcctccaggagaggacggggcctggcagggggcatggggcctccctgggtctggcgtcctgtcctgcccctgccgagggaggagcggttacataagctccgcaggcggcccctccgagccggtccccccagcccagtttccagtgaggcggccagcgcgggcgggggtgccgggcctggcgcacacccgctgctgaccacacgtgtctggaatgtgcagatgtttctttgggggctccgtccggcccccagaccccactcagcatctggtctggggagtgggcgcctggggcactcagctctgagtgtgagactctgaggcaggtctggtttgtctggggccattccctctgctgtggattgggagggccccgggagctgccccacacccagggaagttctcctcagtcccactgttgcattccccgaccccggctcccccggcccaggagcgcctgtggggcagaaggcccagccccaagacttcccggccctgccagcctcaggcttcacccaccctcgcgccaactgtgggcagagcccagggggagggcaggagagccagcgcctggctgggaacacccctgaggggccgaggctccagggcgagggggcccgacctggggttcacacgcccgggtggcgggcagacccgctgcagcatgagacacgtgtcagctacctcgggccggcaggctggccctgctgcccacagccctgggacgtggccccacctgtgacgggtgtggaggggcagcctccaggcctggccacaccctctgctgttgctgctcctgctccaggattggcaagggtgctgggaaggggtgaagacccgtactgtggccacacacctgggacttccttctccacccagtggtgccccagcagccgctaaggagcccgctgggtcccacgctaggatggtcctaactcctcccgccttccagatcggacgctcggcgctggggaccccttgtgtcccggggctggggcaccgtcctgccccccatgggggtgtactcctcccgacaagcttggcttcagcttccctgggagcacatcctggccctcgggcacccatcaggctgtccctgtgcacctggctcccacccttccagctcatagcaggaactggggtgaggagtgcgtggggcagcaagggcctgggaccccagaggaccctgcactctgctctgtgctcttgcctgggcttagggccgctcggtggtcctgctgccagatgcctgggccctgctgtgtcccccatccttgcagggaaccagaacgtgggggcagggcatcagacagcggcgatgatgtcacctggcgggtgcagaggaagcccgaggggcggggtgggggggctggcgcgaggctgcctggctaggccttggcgttcccccagaacggcgatggcaaaagcagatggagacgtgaaaaagtacgggagcaagcgaggtgaggactccacggggacccctgtgctgttccctgtccctgaagcccacacctgagtcctgcccagggcagatgcttccacacccagggggcacctgagtcctacccagggcagacgcttccacaccctgggggctgggggactgcacctggctcctgtctgggccccagcttcattccactgccctgggccctgggagctcggccgagcggggtccccaagaccttgctgcatttctgggccttgggctggggtgagggccgggagaaggagccagcctggagcctggcacgcagggagtgcatggccagaaccggtgacaggcagggctgcctgctggcgtggaagaagtgtccatggcacccccaggcctggttcacagtgggatgggcggggagccggggggctctggggtcctcggctgacctgcccccacccctgccctggcttgtcagctcccagcagcagccactcttgatggattttccagaaaatgaggtgtggccaaacatcttcaggcttttccttctttcctttctcccgtggcctgggtgggagctgctccccatgcctgggggcaggtgcgagagcctgtgcccctccctggggcagtttcacagctgtgtcccttccagggggcctgcctgtgttcaccgtggcctctgcagcacctctcgccccttagggctcctgcgcctcgggtcccggtgcctcatttctccctaaagcattggttctgctgccgccgcagccgctggaaagtccctcctcaggtctaactgcagttcctcacggcacagtgttccccctcgggcatggtgcttgggcagtgggtgtgagtccagctgcctcaccctgtctcgagaatggcctcttgctggtctcccagccaccaccctgtcccaccccacggcggggatggtgtggatgcctagcagcgcggctgtgggcccacccatccttatgggcagtggggagcacctcagcccgtgtccctaccttggtgtagaggaggggacggcagagaagcagggttcagttaggggggaagtggtggccctgccggaggggccgttccctgtgtgcctggcccccagatcctctcccctcccggagcccagggcacaggcataggctctctgagtgtcccacagcccctgggggaagggaactgcacccccaaccgtgccctccatccgcagatggaacgagaagctccgggagccagtgcccagcgtctcatctgtctgggcacccagcccaggtgagggcctggctccaccgtccgtggctggtgctgcttcctggcacggagaaggcctcggctgctctgtcccctcagctggggtggcctctggtccccttctttgttggttcccttctcaagctcttgccctggccccgggccccaccgggcagcctgtgtgtgcgtctctcctgcgccgggtaggctcctgtgggagcggagctccggtgggaggagcagggctggaggctggcaggggctgggcgggtgttcagggatggaggccgccccggcttggggctggctgccgggtggtcattgctgggaagagcaagtctaggcggaggcacctgctgggtcactcgtggggagggtgacacctggggaagtagaggcccgtggcaggaggtgaggcctcggggtcctggggagcaggggggtggtgtgcagacctgcggagccatagtcctgtgccaggagcactactgggagtgcgtgggaccaggaggggtgcccagggtgggcggcagagtgacccccgaggtgcttgaggccgaggggaggtggagttctcggtttgccccagctctctgtctactcacctccgcatcaccagctccaggacctggtttgtaactcgggcagctctgaaaagagagacatgctgccgccctgtggtttctgttgctttttcttcactgactactgacatgggatgtttttcctacggctgtgaccaattgtgcttcttctaattgcctggtttttctttttttgtttttggagttttctctttctttcctccctccctctcaccctccatcctttttttttttatttttattttttgagatggagcttcactcttgcaggatggggtgctggagtgcaggggtgcgatctcagctcactgcaacctctgcctcgcgggttcaagtgattctcctgcctaagcctcctgagtagctggaattacaggtgcttgccaccacgcccgactaattctgtagttttggtagagacagggtgtctccgtgttggtcggtctggtcttgaactcctgacctcaggtgatgcgcccgcctcagcctcccaaagtgctgggattacaggcaggagccattgcacccggctctttccccttctccttttcttctctctctcctccctttctttcttttcttttcttttttttttcttttgagatggagtctcgctctgtcaccaggctggattgcagtggcgtgatcttggctcactgcaaccttcgcctcccgggttcacgtgattctcctgcctcagcctcctgagtggctggcactacaggctcccgccgccatgcccggctaatttttgcatttttagtagagacagggtttcaccctgttggccaggatggtctcgatctcttgatctcatgatccacccaccttggcctcccaaagttctggcattacaggagtgagccaccgtgcccggccatctttctttccttgctttctctttgttttctttcgagaccgggtcttgctctgtcgcccaggctggactgcagtggcacaatcatagctcactgcagcctcgacttccctggctcaagcgatccttcctcctcagccccccgagtagctggaactacagttacacactaccatgcctggctgattctttttttccttgtagagatggggtcttgctatgctgtccatcctggtctcaaactcctggccttcccaaagcactgggtttacaggcataagccaccacacccagtttccttttcttctttttaactggaatagttgacgttttctttattagctgtgtgtcaggagggtatttttggcctttagtatgtcgtgtaagttgctagtgcttttctgagattgtagtttgttttctaattttatttatattttgcgtagaagttgtgtattttagatggagttaggtcggctggtctttgatgttttatttattaattatgtatgtatttatttatttttgaggtagagtctcgccgtttcacccaggctggagtacagtgatgcgatctcagctccctgtagccttgacctctctgggctcaagtgatttttctctcctctacctcccgagtacttgggaccccaggcgcatgccgccatgcctggctaatgtgtattttttgtagatacggggtctcactgtgttgcccagggtggtttcaaaatcctgggcccaggcgatccttccgtctcagctcccacggtgctgtgttaccggcgtgtgccccagtgcctggccgtcttggaggtcttgtttctctgggtttatgcctcgaggtggcgcctgctcccctgtgctccctggtagcctggtagtgagcctgcttctcacacagtcatacctggttgtggtcccacagtgggaccaccctgttgggttcagaacaggagatgggggcccctcgagtctgtgtgggggctgtggacagggttgggagaccttggctctgtgggggactgtggacaggggatggggggccttggccctgcgtgggatgggttgggggtccgtgcccttcctggccctgggtggacaggtccatgtggcactcggcatagggctgagatgggtgcagagggctgaggcccccaggcctctcctggcttggtttccccagatgagtgttcatttgggtcttccatcagaaagtcccctcctgacctctgggagtggggagctcaagggtgggaggccatagcttggggatgctggcaatgtgtgggatgggcccagggatggcctctggcctactaggggctctggccctgacccacggccactcactcctcagagacgtctcccacaacctgctccgggcgctggacgttgggctcctggcgaacctctcggcgctggcagagctgtgagtgtcccccagtcgtgccagcatgcggggctcactccgggtgggctggcggcaccgcctcttgctgctcagctgtgggggcttccatcagctttgccgaatcccccgtctcttccagggatataagcaacaacaagatttctacgttagaagaaggaatatttgctaatttatttaatttaagtgaaatgtaagttgtggttctttgggtggggtcctggctggaccccaggcccccaatatcccttctgccctcccagttggtccgtgtccccttccaggcttgagaccagatcctgggggcagttcactgcctgcttggagccccccagtgccggcttggttggggcaggggaggcggtgctgtcagggtggctccagggcctggttgccagtggggggctggcatagacccttcccaccagacctggtccccaacacctgcccctgccctgcagaaacctgagtgggaacccgtttgagtgtgactgtggcctggcgtggctgccgcgatgggcggaggagcagcaggtgcgggtggtgcagcccgaggcagccacgtgtgctgggcctggctccctggctggccagcctctgcttggcatccccttgctggacagtggctgtggtgagtgccggtgggtggggccagctctgtccttcccagccaggtgggacctgggccctgcagacactgggcagggctcaggaaggcctctctggggggggcctccgggccaagggaacagcatgggagcctgtgagtgcggcgggcggatgtgggggcgtggggtggagccaggaggagcagaacccggggtccagtggctgcctcttctaggtgaggagtatgtcgcctgcctccctgacaacagctcaggcaccgtggcagcagtgtccttttcagctgcccacgaaggcctgcttcagccagaggcctgcagcgccttctgcttctccaccggccagggcctcgcagccctctcggagcagggctggtgcctgtgtggggcggcccagccctccagtgcctcctttgcctgcctgtccctctgctccggccccccgccacctcctgcccccacctgtaggggccccaccctcctccagcacgtcttccctgcctccccaggggccaccctggtggggccccacggacctctggcctctggccagctagcagccttccacatcgctgccccgctccctgtcactgccacacgctgggacttcggagacggctccgccgaggtggatgccgctgggccggctgcctcgcatcgctatgtgctgcctgggcgctatcacgtgacggccgtgctggccctgggggccggctcagccctgctggggacagacgtgcaggtggaagcggcacctgccgccctggagctcgtgtgcccgtcctcggtgcagagtgacgagagcctcgacctcagcatccagaaccgcggtggttcaggcctggaggccgcctacagcatcgtggccctgggcgaggagccggcccgaggtgagtgtctgctgcccactccccttcctccccagggccatccagatggggcagagcctggtacccccgtcttgggcccacactgaccgttgacaccctcgttcccaccggtctccagcggtgcacccgctctgcccctcggacacggagatcttccctggcaacgggcactgctaccgcctggtggtggagaaggcggcctggctgcaggcgcaggagcagtgtcaggcctgggccggggccgccctggcaatggtggacagtcccgccgtgcagcgcttcctggtctcccgggtcaccaggtgcctgcccccaccccccgaggggccataggttgggagatctctgaagcactggggcagagcctgcggctggggagtctcaggaggaaggaggtgggagctgggccggccctggtgagcaggtggcgccggccggtggggccgttcctgtcagctctgcagatgcagaggtggacatgagctgggggcagcctccggacactcctgggcacgccatacgggaggtggcctgcacggggatccctgccggtacccacaggccccgtgggtgggtgctgctgtgagcctgggctggtgggccctggtctccgggctctgagcctcagtttccccatctggaaagggggacagtgatggggctcccagcgggctgctgtgagggtgggaggatggaggagtgccctgagccccctgccatcccacacccgcccccaggagcctagacgtgtggatcggcttctcgactgtgcagggggtggaggtgggcccagcgccgcagggcgaggccttcagcctggagagctgccagaactggctgcccggggagccacacccagccacagccgagcactgcgtccggctcgggcccaccgggtggtgtaacaccgacctgtgctcagcgccgcacagctacgtctgcgagctgcagcccggaggtgtgcggggggccaggcaggggcctgagacgctggctgtggttaggggcctgccgagcgcccgcggtggagcctgggctgaggaggaggggctggtgggggggttttcgggcggctcggtccccagtctgttcgtcctggtgtcctgggccctggcccggcgcctcactgtgcactcgccaccccaggcccagtgcaggatgccgagaacctcctcgtgggagcgcccagtggggacctgcagggacccctgacgcctctggcacagcaggacggcctctcagccccgcacgagcccgtggaggtagtcggccccccacgttctacaacctgccctcctgcctgcccctggaggccttgcctgccctgcccactgtgggtctcgccaaaaaacttgggggccttaatgttgcttgtgcccagtgaagatggttgggaaaatccagagtgcagagaggaaagcgtttactcacattacctccaggccttttctctgagcgtgtgtgagttattcctgaaaggcaggtcaggggtcctgccccccatggacagtttccaccggagtcttcctctcgagcgacaggagccaggcctgtgggggtctgatggctcgctctccttccctcccctcttcctgggaagttcgggtagggggagtctgggcttcaggctgggatggggtctgtggagctgaggcggccccctgcccaccaggtcatggtattcccgggcctgcgtctgagccgtgaagccttcctcaccacggccgaatttgggacccaggagctccggcggcccgcccagctgcggctgcaggtgtaccggctcctcagcacagcaggtgggactctgggtggtgggtggtgggtggtgggcgccgcaggactcggggtggcctctctgagctttcacgtctgctggtcctgtggccaccagagtggttcccagtcttaggtggacagagcaggggttccagagacaccagctcattccaggtgtcctgggggtggattgggtggggcctgcctgggggccggcctgggtcagtcggctggccggagacggacgcagcactgggctgggagtgctgcccaggtggggagacctgtcctcacagcaaggccaggattgctggtgcaggcagttgggcatctctgacggtggcctgtgggcaaatcagggccccaacaccctcccctcctcacagggaccccggagaacggcagcgagcctgagagcaggtccccggacaacaggacccagctggcccccgcgtgcatgccagggggacgctggtgccctggagccaacatctgcttgccgctggacgcctcctgccacccccaggcctgcgccaatggctgcacgtcagggccagggctacccggggccccctatgcgctatggagagagttcctcttctccgttcccgcggggccccccgcgcagtactcggtgtgtggccctgacctgggtctgttccctgcatctcctcaggccaccttcctgtctgctgcccagggtctgggtctgtgcaccagacacacccagcctgcaggcccctcccacgtccttgccacctctgacctccgacctctgcagtgccctcggccctctcccagtgggagaagctctcgcctgggcccttggcacgagctgtgcctcctcttcctctctcccagcacagctgctccttcctgtctgccaggtcttggcctgtgtcctctccccgtgtgtcccccggtctgcaactgtcctgcctgtccttgtcacgagcactgtggggaggctccttgaggtgtggctgacgaagcggggagccctgcgtgtccaccctcatccgtcgtgcgggggtccacgggccatgaccgtgaggacgtgatgcagccctgcctccctctccacaggtcaccctccacggccaggatgtcctcatgctccctggtgacctcgttggcttgcagcacgacgctggccctggcgccctcctgcactgctcgccggctcccggccaccctggtccccgggccccgtacctctccgccaacgcctcgtcatggctgccccacttgccagcccagctggagggcacttgggcctgccctgcctgtgccctgcggctgcttgcagccacggaacagctcaccgtgctgctgggcttgaggcccaaccctggactgcggctgcctgggcgctatgaggtccgggcagaggtgggcaatggcgtgtccaggcacaacctctcctgcagctttgacgtggtctccccagtggctgggctgcgggtcatctaccctgccccccgcgacggccgcctctacgtgcccaccaacggctcagccttggtgctccaggtggactctggtgccaacgccacggccacggctcgctggcctgggggcagtgtcagcgcccgctttgagaatgtctgccctgccctggtggccaccttcgtgcccggctgcccctgggagaccaacgataccctgttctcagtggtagcactgccgtggctcagtgagggggagcacgtggtggacgtggtggtggaaaacagcgccagccgggccaacctcagcctgcgggtgacggcggaggagcccatctgtggcctccgcgccacgcccagccccgaggcccgtgtactgcagggagtcctagtggtgagtatggccgaggctccaccaccagcccccaggcaggtgcctgcagacagggtgctcacacagggcgtgaggcctggcttcccagtgagggcagcagcccagttactggggacgtcggccccgggcaggtcctgctggctggctcctcgggctacctggtgggctttaaattcctggaaagtcacggctctgacagtggctccgctaactcattccactgtctcatttcacaaaatgaatttaaaactctgctccctgacctcacacgagcccccgtgagtctctcacgccctctgctgtgttctcgcctggctaaagcgagtggcttttgaggtggagtctgaacccctgatgggaaactgcgggctgcccgcggtgccaccatgctgggtacatgggggacagggctgtctccatcttgcgggtacctgcctcttcaccaggggccttgggaggggccatcagaaatggcgtgacctgtgcagcctgtcctgggttctgtaagccagtgtaggtgcctcccctcactgctccgagctctctgggtgaggagctggggcaagagcgccgggagggtctgagaagactcagagagaggtggactctttgtagctggtactaggtttgctttacagatggggaaactgaggcacagagaggttgaggcattagtagtactacatggctggctggagagccggacagtgagtgtcccagcccgggcttggctcccatggcatgcagagccccgggcacctcctctcctctgtgccccgcgtgggactctccagcccgacgggaggtgtgtccaggaggcgacaggctaagggcagagtcctccacagagcccaggctgacaccattccccccgcagaggtacagccccgtggtggaggccggctcggacatggtcttccggtggaccatcaacgacaagcagtccctgaccttccagaacgtggtcttcaatgtcatttatcagagcgcggcggtcttcaagctctcagtaggtgggcgggggtggggaggggaggggatggggcggggcagggcgggggcgggctccaccttcacctctgccttctgctctgcttcatgctgcccgaggacgctgccatggctgtgggtgagtggagggagggacgccaatcagggccaggcctctcacctgccacctgggctcactgacgcctgtccctgcagctgacggcctccaaccacgtgagcaacgtcaccgtgaactacaacgtaaccgtggagcggatgaacaggatgcagggtctgcaggtctccacagtgccggccgtgctgtcccccaatgccacgctagcactgacggcgggcgtgctggtggactcggccgtggaggtggccttcctgtgagtgactcgggggccggtttggggtgggcaccaggctcttgtcccagccccagcctcagccgagggacccccacatcacggggttgcttttctgagcctcggtttccctgtctgttgggaggtaactgggtgcacaggagccctgaggctgcacgggagccgggagaggcctcagcacagccgggtgggccctgaatggaggcccggggcgtgactgcagagtggagcctcggctgggtcccaagcaccccctgccccgccaccgcccacccctgtcccggttcactcactgcgtcccaccgccccggcaggtggacctttggggatggggagcaggccctccaccagttccagcctccgtacaacgagtccttcccggttccagacccctcggtggcccaggtgctggtggagcacaatgtcatgcacacctacgctgccccaggtgagggatgagggggtgagggggccactgcctttcaggctctgagcacggggtccccccagctccccagtcaagctgccccccttcctccccaacagccctcactgtgacctcacctgggctgatggcttaggcccctactggggtgagggaggggccaggcgtggggggagtggacagggaagctgggcccctgaactgcgccccccgccctccccgggcctggctcttgctgctctgctgccccgagtgcagctgcacttggaggcggtgccgtcctcgccaggcagccctcagtgctgctacacctgtgctccgtcccgcacgtggcttgggagcctgggacccttaaggctgggccgcaggtgcagccgttcaccccgggctcctcaggcggggggcttctgccgagcgggtggggagcaggtgggggtgccgcggctgccccactcgggcctgtccccacaggtgagtacctcctgaccgtgctggcatctaatgccttcgagaacctgacgcagcaggtgcctgtgagcgtgcgcgcctccctgccctccgtggctgtgggtgtgagtgacggcgtcctggtggccggccggcccgtcaccttctacccgcacccgctgccctcgcctgggggtgttctttacacgtgggacttcggggacggctcccctgtcctgacccagagccagccggctgccaaccacacctatgcctcgaggggcacctaccacgtgcgcctggaggtcaacaacacggtgagcggtgcggcggcccaggcggatgtgcgcgtctttgaggagctccgcggactcagcgtggacatgagcctggccgtggagcagggcgcccccgtggtggtcagcgccgcggtgcagacgggcgacaacatcacgtggaccttcgacatgggggacggcaccgtgctgtcgggcccggaggcaacagtggagcatgtgtacctgcgggcacagaactgcacagtgaccgtgggtgcggccagccccgccggccacctggcccggagcctgcacgtgctggtcttcgtcctggaggtgctgcgcgttgaacccgccgcctgcatccccacgcagcctgacgcgcggctcacggcctacgtcaccgggaacccggcccactacctcttcgactggaccttcggggatggctcctccaacacgaccgtgcgggggtgcccgacggtgacacacaacttcacgcggagcggcacgttccccctggcgctggtgctgtccagccgcgtgaacagggcgcattacttcaccagcatctgcgtggagccagaggtgggcaacgtcaccctgcagccagagaggcagtttgtgcagctcggggacgaggcctggctggtggcatgtgcctggcccccgttcccctaccgctacacctgggactttggcaccgaggaagccgcccccacccgtgccaggggccctgaggtgacgttcatctaccgagacccaggctcctatcttgtgacagtcaccgcgtccaacaacatctctgctgccaatgactcagccctggtggaggtgcaggagcccgtgctggtcaccagcatcaaggtcaatggctcccttgggctggagctgcagcagccgtacctgttctctgctgtgggccgtgggcgccccgccagctacctgtgggatctgggggacggtgggtggctcgagggtccggaggtcacccacgcttacaacagcacaggtgacttcaccgttagggtggccggctggaatgaggtgagccgcagcgaggcctggctcaatgtgacggtgaagcggcgcgtgcgggggctcgtcgtcaatgcaagccgcacggtggtgcccctgaatgggagcgtgagcttcagcacgtcgctggaggccggcagtgatgtgcgctattcctgggtgctctgtgaccgctgcacgcccatccctgggggtcctaccatctcttacaccttccgctccgtgggcaccttcaatatcatcgtcacggctgagaacgaggtgggctccgcccaggacagcatcttcgtctatgtcctgcagctcatagaggggctgcaggtggtgggcggtggccgctacttccccaccaaccacacggtacagctgcaggccgtggttagggatggcaccaacgtctcctacagctggactgcctggagggacaggggcccggccctggccggcagcggcaaaggcttctcgctcaccgtgctcgaggccggcacctaccatgtgcagctgcgggccaccaacatgctgggcagcgcctgggccgactgcaccatggacttcgtggagcctgtggggtggctgatggtggccgcctccccgaacccagctgccgtcaacacaagcgtcaccctcagtgccgagctggctggtggcagtggtgtcgtatacacttggtccttggaggaggggctgagctgggagacctccgagccatttaccacccatagcttccccacacccggcctgcacttggtcaccatgacggcagggaacccgctgggctcagccaacgccaccgtggaagtggatgtgcaggtgcctgtgagtggcctcagcatcagggccagcgagcccggaggcagcttcgtggcggccgggtcctctgtgcccttttgggggcagctggccacgggcaccaatgtgagctggtgctgggctgtgcccggcggcagcagcaagcgtggccctcatgtcaccatggtcttcccggatgctggcaccttctccatccggctcaatgcctccaacgcagtcagctgggtctcagccacgtacaacctcacggcggaggagcccatcgtgggcctggtgctgtgggccagcagcaaggtggtggcgcccgggcagctggtccattttcagatcctgctggctgccggctcagctgtcaccttccgcctgcaggtcggcggggccaaccccgaggtgctccccgggccccgtttctcccacagcttcccccgcgtcggagaccacgtggtgagcgtgcggggcaaaaaccacgtgagctgggcccaggcgcaggtgcgcatcgtggtgctggaggccgtgagtgggctgcaggtgcccaactgctgcgagcctggcatcgccacgggcactgagaggaacttcacagcccgcgtgcagcgcggctctcgggtcgcctacgcctggtacttctcgctgcagaaggtccagggcgactcgctggtcatcctgtcgggccgcgacgtcacctacacgcccgtggccgcggggctgttggagatccaggtgcgcgccttcaacgccctgggcagtgagaaccgcacgctggtgctggaggttcaggacgccgtccagtatgtggccctgcagagcggcccctgcttcaccaaccgctcggcgcagtttgaggccgccaccagccccagcccccggcgtgtggcctaccactgggactttggggatgggtcgccagggcaggacacagatgagcccagggccgagcactcctacctgaggcctggggactaccgcgtgcaggtgaacgcctccaacctggtgagcttcttcgtggcgcaggccacggtgaccgtccaggtgctggcctgccgggagccggaggtggacgtggtcctgcccctgcaggtgctgatgcggcgatcacagcgcaactacttggaggcccacgttgacctgcgcgactgcgtcacctaccagactgagtaccgctgggaggtgtatcgcaccgccagctgccagcggccggggcgcccagcgcgtgtggccctgcccggcgtggacgtgagccggcctcggctggtgctgccgcggctggcgctgcctgtggggcactactgctttgtgtttgtcgtgtcatttggggacacgccactgacacagagcatccaggccaatgtgacggtggcccccgagcgcctggtgcccatcattgagggtggctcataccgcgtgtggtcagacacacgggacctggtgctggatgggagcgagtcctacgaccccaacctggaggacggcgaccagacgccgctcagtttccactgggcctgtgtggcttcgacacaggtcagtgcgtggcagggccgtcctccatgcccctcacccgtccacacccatgagcccagagaacacccagcttgccaccagggctggcccgtcctcagtgcctggtgggccccgtcccagcatggggagggggtctcccgcgctgtctcctgggccgggctctgctttaaaactggatggggctctcaggccacgtcgccccttgttctcggcctgcagagggaggctggcgggtgtgcgctgaactttgggccccgcgggagcagcacggtcaccattccacgggagcggctggcggctggcgtggagtacaccttcagcctgaccgtgtggaaggccggccgcaaggaggaggccaccaaccagacggtgggtgccgcccgcccctcggccacttgccttggacagcccagcctccctggtcatctactgttttccgtgttttagtgctggtggaggccgcacgctctcccctctctgtttctgatgcaaattctatgtaacacgacagcctgcttcagctttgcttccttccaaacctgccacagttccacgtacagtcttcaagccacatatgctctagtggcaaaagctacacagtcccctagcaataccaacagtgaggaagagccccttcccaccccagaggtagccactgtccccagcccatgtccctgttgctggatgtggtgggccggttctcaccctcacgctcccctctctggaccggccaggaggcttggtgaccctgagcccgtggtggctgctcctgctgctgtcaggcggggcctgctggtgccccagagtgggcgtctgttccccagtccctgctttcctcagctggcctgattgggggtcttcccagaggggtcgtctgaggggagggtgtgggagcaggttccatcccagctcagcctcctgacccaggccctggctaagggctgcaggagtctgtgagtcaggcctacgtggcagctgcggtcctcacacccacacatacgtctcttctcacacgcatccccccaggggccctcagtgagcattgcctgcctcctgctagggtccagctgggtccagtacaccagaacgcacactccagtgtcctctgccctgtgtatgcccttccgccgtccaagttggaaggtggcaaaccggatgagtatcctgggagggagtgagctcaccggcagtggccaggcccctgggaaacctggagtttgggagcagcatcctccatgggtcccccagtccttccagcaggccaaatagacctgtgttggaggtaaccccactcccacgccaggtgctgatccggagtggccgggtgcccattgtgtccttggagtgtgtgtcctgcaaggcacaggccgtgtacgaagtgagccgcagctcctacgtgtacttggagggccgctgcctcaattgcagcagcggctccaagcgaggggtgagtgttgagcggggtgtgggcgggctggggatgggtcccatggccgaggggacggggcctgcaggcagaagtggggctgacagggcagagggttgcgccccctcaccaccccttctgcctgcagcggtgggctgcacgtacgttcagcaacaagacgctggtgctggatgagaccaccacatccacgggcagtgcaggcatgcgactggtgctgcggcggggcgtgctgcgggacggcgagggatacaccttcacgctcacggtgctgggccgctctggcgaggaggagggctgcgcctccatccgcctgtcccccaaccgcccgccgctggggggctcttgccgcctcttcccactgggcgctgtgcacgccctcaccaccaaggtgcacttcgaatgcacgggtgagtgcaggcctgcgtggggggagcagcgggatcccccgactctgtgacgtcacggagccctcccgtgatgccgtggggaccgtccctcaggctggcatgacgcggaggatgctggcgccccgctggtgtacgccctgctgctgcggcgctgtcgccagggccactgcgaggagttctgtgtctacaagggcagcctctccagctacggagccgtgctgcccccgggtttcaggccacacttcgaggtgggcctggccgtggtggtgcaggaccagctgggagccgctgtggtcgccctcaacaggtgagccaggccgtgggagggcgcccccgagactgccacctgctcaccacccccctctgctcgtaggtctttggccatcaccctcccagagcccaacggcagcgcaacggggctcacagtctggctgcacgggctcaccgctagtgtgctcccagggctgctgcggcaggccgatccccagcacgtcatcgagtactcgttggccctggtcaccgtgctgaacgaggtgagtgcagcctgggaggggacgtcacatctgctgcatgcgtgcttgggaccaagacctgtacccctgcctggagctttgcagagggctcatcccgggccccagagataaatcccagtgaccctgaagcagcaccccgaccttccgctcccagcagccacacccaccgggccctctccggcgtctgctttccacaatgcagcccccgcccaggagggcccatgtgcttaccctgttttgcccatgaagaaacagctcagtgttgtgggtcagtgcccgcatcacacagcgtctagcacgtaactgcaccccgggagtcgtgggcatctgctggcctcctgccggcctcctgcgctgctgacagcttgctgtgccccctgcctgccccagtacgagcgggccctggacgtggcggcagagcccaagcacgagcggcagcaccgagcccagatacgcaagaacatcacggagactctggtgtccctgagggtccacactgtggatgacatccagcagatcgctgctgcgctggcccagtgcatggtaggatggccccacctgctcaccctgccccgcatgcctgccagggcactgggttcagccccccagggcagacgggcagcttggccgaggagctgagcctccagcctgggctccttcctgccatggcgttcctcggtctctgacctgcttcagtagcctcagccgttctgtcctgtgtgaacgcagggtgcctctcgggggacccagggtgtaaagaggggcccagatgtggggagggactaagaagatgctgctctgtgccctccactctcccctcccctcccctcccccttccctcccctagcccctcccctcctcccctcccctagcccttcccctcctcccctcccctagccctttcccttcttcccccccagcccttcccctcctcccctcccctttttctccactcccctctcctctctcccctcctcctccgctctcatgtgaagaggtgccttgtgtggtcggtgggctgcatcacgtggtccccaggtggaggccctgggtcatgcagagccacagaaaatgcttagtgaggaggctgtgggggtccagtcaagtgggctctccagctgcagggctgggggtgggagccaggtgaggacccgtgtagagaggagggcgtgtgcaaggagtggggccaggagcggggctggacactgctggctccacacaggggcccagcagggagctcgtatgccgctcgtgcctgaagcagacgctgcacaagctggaggccatgatgctcatcctgcaggcagagaccaccgcgggcaccgtgacgcccaccgccatcggagacagcatcctcaacatcacaggtgccgcggcccgtgccccatgccacccgcccgccccgtgcggccctttcctctgcctccctcctccccccaaccgcgtcgcctttgccccatcccatcttcgtccccctcccctccccccaattcccatcctcatccccctcccccaattcccattctcctccccctcccccttccctattaccatcccttttctccatctctctccccttttctccatttccccccccgtcctccccgtccttttgtccattcccctcatcttcctcatccccctcatcccccttcccctcccttatcccccttcccctccctttccccctgctcctcttcttctcccttctcttttctctacccttttccttcctttttcctccctctccccatcatccccctcatcttcgtcctcatccccatcaccttccccctcccccctccaccactctctctccagcttcccccttccttctgcctgcacctcgctctctgccccctcaggttccccctttctcccagcccccaccctccggctccccctttttgcctgcccccaccctccctctacctccctgtctctgcactgacctcacgcatgtctgcaggagacctcatccacctggccagctcggacgtgcgggcaccacagccctcagagctgggagccgagtcaccatctcggatggtggcgtcccaggcctacaacctgacctctgccctcatgcgcatcctcatgcgctcccgcgtgctcaacgaggagcccctgacgctggcgggcgaggagatcgtggcccagggcaagcgctcggacccgcggagcctgctgtgctatggcggcgccccagggcctggctgccacttctccatccccgaggctttcagcggggccctggccaacctcagtgacgtggtgcagctcatctttctggtggactccaatccctttccctttggctatatcagcaactacaccgtctccaccaaggtggcctcgatggcattccagacacaggccggcgcccagatccccatcgagcggctggcctcagagcgcgccatcaccgtgaaggtgcccaacaactcggactgggctgcccggggccaccgcagctccgccaactccgccaactccgttgtggtccagccccaggcctccgtcggtgctgtggtcaccctggacagcagcaaccctgcggccgggctgcatctgcagctcaactatacgctgctggacggtgcgtgcagcgggtggggcacacgcggccccctggccttgttcttggggggaaggcgtttctcgtagggcttccatgggtgtctctggtgaaatttgctttctgtttcatgggctgctgggggcctggccagagaggagctgggggccacggagaagcaggtgccagctctggtgcagaggctcctatggcctttcaggcccgtggcagagggtgggctcaggagggccatcgtgggtgtcccccgggtggttgagcttcccggcaggcgtgtgacctgcgcgttctgccccaggccactacctgtctgaggaacctgagccctacctggcagtctacctacactcggagccccggcccaatgagcacaactgctcggctagcaggaggatccgcccagagtcactccagggtgctgaccaccggccctacaccttcttcatttccccggggtgagctctgcgggccagcctggcagggcagggcagggcatcatgggtcagcattgcctgggttactggccccatggggacggcaggcagcgaggggactggaccgggtatgggctctgagactgcgacatccaacctggcggagcctgggctcacgtccgctaccccttccctgcccaggagcagagacccagcggggagttaccatctgaacctctccagccacttccgctggtcggcgctgcaggtgtccgtgggcctgtacacgtccctgtgccagtacttcagcgaggaggacatggtgtggcggacagaggggctgctgcccctggaggagacctcgccccgccaggccgtctgcctcacccgccacctcaccgccttcggcgccagcctcttcgtgcccccaagccatgtccgctttgtgtttcctgtgagtgaccctgtgctcctgggagcctctgcagagtcgaggagggcctgggtgggctcggctctatcctgagaaggcacagcttgcacgtgacctcctgggcccggcggctgtgtcctcacaggagccgacagcggatgtaaactacatcgtcatgctgacatgtgctgtgtgcctggtgacctacatggtcatggccgccatcctgcacaagctggaccagttggatgccagccggggccgcgccatccctttctgtgggcagcggggccgcttcaagtacgagatcctcgtcaagacaggctggggccggggctcaggtgaggggcgcagcggggtggcagggcctcccctgctctcactggctgtgctggttgcaccctctgggagtgagtctcgtcgcaggcgtcagaacaaggcagtttttgcagtgctgtgtgaagggctcgtgtgttcatcctgggaatgacctcgtgagcactcactgtccctgaggactaggacagctcctagctggaagtaggtgccagtcagtcagggtgggcagcccacgttctgcacagtagcgtggccccacaagtgacgtgagcatcgctaccactgtgggagactgtgcatccacccgcgatcctgactgcatagctcgtctctcagacggaggcgccagcaccctccccgtggctgtttcttcagtacctccattttcctttcattggaattgcccttctggcattccctttttgttttcgtttttctttttttagagacggagtctcactctgttgcccaggctggagtgcaatggcatgatcttggctcacagcaacttccagctcccgggtttaagccattccccttaagcgattctcctgagtagctgggagtacaggtgcacaccaccacacccagttaatttttcaccatgtcagccaggcgaactcctgacctcaggtgatccgcctgcctcggcctgccagagtgctgggatgacaggtgtgagccaccacacctggctgtgttcccattttttatctctgtgctgctttcctcttcattgcccagttctttcttttgattacctacttttaaaaactgtcggccgggcgcggtggctcacacctgtaatccgagcactttgggaggccaggcaggcaaatcacggggtcaggagatcgagaccatcctggctaacggtgaaaccctgtctctaataaaaagtacaaaaaaattagcccggcgtagtggcaggcgcctgtagtcccagctccttgggagactgaggcaggagaatggcgtgaacccgggaggcggagcttgcagtgagctgagattgcgccactgcactccagcctgggtgacacagcaagactccatctcaaaaaaaaaagaaaaaaaatactgtcacctgggtctgtcactgggagaggaggtgacacagcttcacgctttgcagtctgtgcatgaactgagggacgggtgtgtggtgcgggtcaccggttgtggcatgactgaggcgtggacaggtgtgcagtgcgggtcactggttgtggtgtggactgaggcgtgtgcagccatgtttgcatgtcacaagttacagttctttccatgtaacttaatcatgtccttgaggtcctgctgttaattggacaaattgcagtaaccgcagctccttgtgtatggcagagccgtgcaaagccgggactgcctgtgtggctccttgagtgcgcacaggccaaagctgagatgacttgcctgggatgccacacgtgttgggcagcagaccgagcctcccacccctccctcttgcctcccaggtaccacggcccacgtgggcatcatgctgtatggggtggacagccggagcggccaccggcacctggacggcgacagagccttccaccgcaacagcctggacatcttccggatcgccaccccgcacagcctgggtagcgtgtggaagatccgagtgtggcacgacaacaaaggtttgtgcggaccctgccaagctctgcccctctgcccccgcattggggcgccctgcgagcctgacctccctcctgcgcctctgcagggctcagccctgcctggttcctgcagcacgtcatcgtcagggacctgcagacggcacgcagcgccttcttcctggtcaatgactggctttcggtggagacggaggccaacgggggcctggtggagaaggaggtgctggccgcgagtaaggcctcgttccatgttcccactccgtgggaggttgggcagggtggtcctgccccgtggcctcctgcagtgcggccctccctgccttctaggcgacgcagcccttttgcgcttccggcgcctgctggtggctgagctgcagcgtggcttctttgacaagcacatctggctctccatatgggaccggccgcctcgtagccgtttcactcgcatccagagggccacctgctgcgttctcctcatctgcctcttcctgggcgccaacgccgtgtggtacggggctgttggcgactctgcctacaggtgggtgccgtaggggtcggggcagcctcttcctgcccagcccttcctgcccctcagcctcacctgtgtggcctcctctcctccacacagcacggggcatgtgtccaggctgagcccgctgagcgtcgacacagtcgctgttggcctggtgtccagcgtggttgtctatcccgtctacctggccatcctttttctcttccggatgtcccggagcaaggtgggctggggctggggacccgggagtactgggaatggagcctgggcctcggcaccatgcctagggccgccactttccagtgctgcagccagagggaaaggcgtccaccaaaggctgctcgggaagggtcaacacacttgagcagccttagctagactgaccagggagaaagagagaagactcagaagccagaatggtgaaagaacgagggcactttgctaagcagacgccacggacgactgcacagcagcacgccagataactcagaagaagcaagcacgcggctgtgcacgcttccgaaatgcactccagaagaaaatctcagtacatctataggaagtgaagaggctgagttagtcccttagaaacgtcccagtggccgggccgggtgtggtggctcacgcctgtaatcccaacacttcaggtggccgaggtgggcggatctgagtccaggagtttgagaccagcctgggcaacatagcaagaccccatctatataaaacattaaaaagggccaggcgcggtggctcacgcctgtaatcccagcactttgggaggccgaggcgggcagatcacttgaggtcaggagttcgagaccagcctggccaacacaatgaaaccccgactctactacaaatacaaaaacttagctgggcatggtggcgggcgcctgtagtcccagctactcgagaggctgaggcaggagaatggcatgaacccaggaggcggagcttgcagtgagccgagattgcgccactgcactccatcctgggcaacggagcaagactccatctccaaaaaaaaaaaaaaaaaatcccacaaagaaaagctcaggctcagagccttcacgatagaatttttctaagcagttaaggaagaattaacaccaatccttcacagactctttccaagaatacagcaggtgggaacgcttcccattcatacggaaacgggaggccgcaccccttaggaatgcacacgtggggtcctcaagaggttacatgcaaactaaccccagcagcacacagagaaggcgcataagccgcgaccaggaggggttgctcccgagtccgtggcaggaaccagaggccacatgtggctgctcgtatttaagttaattaaaatggaacgatggccgggtgtggtggctcacacctgtaatcccagcactttgggaggcggaggcgggcagatcacttgaggtcaggagttccaagaccagcctggccaacacagtgaaaccccgtctctactaaaaatacaaaaaattagctgggcatggtggcaggcacctgtaatcccagctactcaggaggctgagccaggacaatcgcctgaacgcgggaggtggaggttgcagtgagctgagattgcgccattgcactccagcctgggtgacagcgagactccatctaaaaaagaaaatatgaaatttaaaactctgttccttagctgcaccagtctgctgtcaagtgttcagtggcacacgtcgcgaggggctgccatcacggacggtgcagatgtcccatatatccagcattctaggacattctgtcagatggcaccgggctctgtcctgtctgctgaggaggtggcttctcatccctgtcctgagcaggtctgagctgccgcccgctgaccactgccctcgtcctgcaggtggctgggagcccgagccccacacctgccgggcagcaggtgctggacatcgacagctgcctggactcgtccgtgctggacagctccttcctcacgttctcaggcctccacgctgaggtgaggactctactgggggtcctgggctgggctgggggtcctgccgccttggcgcagcttggactcaagacactgtgcacctctcagcaggcctttgttggacagatgaagagtgacttgtttctggatgattctaagaggtgggttccctagagaaacctcgagccctggtgcaggtcactgtgtctggggtgccgggggtgtgcgggctgcgtgtccttgctgggtgtctgtggctccatgtggtcacaccacccgggagcaggtttgctcggaagcccagggtgtccgtgcgtgactggacgggggtgggctgtgtgtgtgacacatcccctggtaccttgctgacccgcgccacctgcagtctggtgtgctggccctccggcgagggaacgctcagttggccggacctgctcagtgacccgtccattgtgggtagcaatctgcggcagctggcacggggccaggcgggccatgggctgggcccagaggaggacggcttctccctggccagcccctactcgcctgccaaatccttctcagcatcaggtgagctggggtgagaggagggggctctgaagctcacccttgcagctgggcccaccctatgcctcctgtacctctagatgaagacctgatccagcaggtccttgccgagggggtcagcagcccagcccctacccaagacacccacatggaaacggacctgctcagcagcctgtgagtgtccggctctcgggggaggggggattgccagaggaggggccgggactcaggccaggcagccgtggttcccgcctggggtagggtggggtggggtgccagggcagggctgtggctgcaccacttcacttctctgaacctctgttgtctgtggaaagagcctcatgggatccccagggccccagaaccttccctctagggagggagcaggctcatggggctttgtaggagcagaaaggctcctgtgtgaggctggccggggccacgtttttatcttggtctcagagcagtgagaaattatgggcgggtttttaaataccccatttttggccgggcgcggtggctcacacgtgtaatcccagcactttgggaggccgaggtgggcagatgacctgaggtcagcagttcgagaccagcctggccaacatggcgaaaccccgtctctactaaaaatacaaaaaattagccgggcatgctggcaggcgcctgtagtcccagttactcgggagactgaggtaggagaatcgattgaacctggtaggtgaaggttgtagtgagccgagatcgcgccactgcactccagcctgggcaacaagagcgaaactccgtctcaaaaacaaaaaaattcctcaatttcttggttgttttgtaacttatcaacaaatggtcatatagaggttaccttgtatgtagtcacgcacatagtcacgcacatggcagccggcggcggagcgcacccacggcgtgttcccacgcgtgtgaccccgggctctgccatgccctcctatgctcaggtgtgctgaggtccacacggccctgccgttgcactgcagctgcctgcaggattcagtgcagtggcatgcagtgcaggtgcggtgccccggagccacaggccacaccacagggcctgcatgcacaggggctgcggtgtctgggtttgggtaactacgccctgtgacatttgcacagcaacagaattacctaatgacgcatttctcagaacacatccctggcactaagtggtgcgtgactgctgcttttgcatccacatctagtttgatttgtgtgttattcctttgagtgcttctcattgttaagcaaccaagaactaaagaggtatgaactgcccctggactcaaacaaaaaggaaaacttcctgatttacaaaaggcagataaccatcacatgagggcatctttatgaataaattgctggttggttttaaaaatacagagtatggggaaatccaggggtagtcactacatgctgaccagccccaggtatctccggcccaaagctctgtgaaatccagattcagtgcttccgcggggatttctgacggcagctcagactccgcatccacacagagcgcgtggccctcaccctcccggcttcctcaacccttggccgtcccttgctcggacagtgcttcgggctgaccaggtcggaggcttgggtttgtcctggacccctctgcgtccttcctcactgcagcctccagcgcgtcccgtggctcctttcccaacgcagagcacggccttccctgcgcctgagcctgcaccctccgtcctggcggcgcctctgccctggcattccctgccactccatgcctccctattggccattctccgtctctgccagcgagagcctgctccctgagtcagaccctgagtcatttgtgttgctataaaggaatagttgaggctgggttattttttatttttatttatttttttgagatggagtctctgttgcccagactggagtgcagtcgcatgatctcggctcactgcaaagtctgcctcccacgttcaagcagttatctgcctcagcctcccaagtagctaagattacaggcgcccgccgccacagccggctaattttttgtgtgtgtgttttagtagagaggaggtttcaccatcttagccaggctggtcttgaactcctgacctcgtgatccacccatctcagcctcccaaaatgctgagattacaggcgtgagccaccacgcctgaccaagttgaggctaggtcattttttaattttttgtaaagacagggtctcactgtctccaactcctgagctcaagtgatcctcctgcctcagcctcctgaagtgctgggattacaggcttgagacactgcgcccagccaagagtgtcttttatcctccgagagacagcaaaacaggaagcattcagtgcagtgtgaccctgggtcaggccgttctttcggtgatgggctgacgagggcgcaggtacgggagagcgtcctgagagcccgggactcggcgtctcgcagttggtctcgtcctccccctcaacgtgtcttcgctgcctctgtacctcttctctagcagctctgggaccgggcatatcagcatggtggcccgatgcagtggcacagcctcggtggtcactggctcctggagacacaagcagatctctggcctcagggagccctacacactgttgggatttgaaaggcattcatatgtttccttgtccagaagttaattttaggccataaacctgcatgggacagacacactggcgtctctagattgtagagatgcttgttggatggttgagacccaatcatagtttgcagggttgaaggggggctcattgcaccctgagagactgtgcactgctgtaagggcagctggtcaggctgtgggcgatgggtttatcagcagcaagcgggcgggagagggacgcaggcggacgcctgacttcggtgcctggagtggctcttggttccctggctcccagcaccactcccactctcgtttggggtagggtcttccggctttttgtcggggggaccctgtgacccaagaggctcaagaaactgcccgcccaggttaacatgggcttggctgcaactgcctcctggaggccgggatgaattcacagcctaccatgtccctcaggtccagcactcctggggagaagacagagacgctggcgctgcagaggctgggggagctggggccacccagcccaggcctgaactgggaacagccccaggcagcgaggctgtccaggacaggtgtgcttgcgtagccccgggatgcccctagcccctccctgtgagctgcctctcacaggtctgtctctgcttccccaggactggtggagggtctgcggaagcgcctgctgccggcctggtgtgcctccctggcccacgggctcagcctgctcctggtggctgtggctgtggctgtctcagggtgggtgggtgcgagcttccccccgggcgtgagtgttgcgtggctcctgtccagcagcgccagcttcctggcctcattcctcggctgggagccactgaaggtgagggggctgccaggggtaggctacaggcctccatcacgggggacccctctgaagccaccccctccccaggtcttgctggaagccctgtacttctcactggtggccaagcggctgcacccggatgaagatgacaccctggtagagagcccggctgtgacgcctgtgagcgcacgtgtgccccgcgtacggccaccccacggctttgcactcttcctggccaaggaagaagcccgcaaggtcaagaggctacatggcatgctgcgggtgagcctgggtgcggcctgtgcccctgccacctccgtctcttgtctcccacctcccacccatgcacgcaggacactcctgtccccctttcctcacctcagaaggcccttaggggttcaatgctctgcagcctttgcccggtctccctcctaccccacgccccccacttgctgccccagtccctgccagggcccagctccaatgcccactcctgcctggccctgaaggcccctaagcaccactgcagtggcctgtgtgtctgcccccaggtggggttccgggcagggtgtgtgctgccattaccctggccaggtagagtcttggggcgccccctgccagctcaccttcctgcagccacacctgccgcagccatggctccagccgttgccaaagccctgctgtcactgtgggctggggccaggctgaccacagggcccccccgtccaccagagcctcctggtgtacatgctttttctgctggtgaccctgctggccagctatggggatgcctcatgccatgggcacgcctaccgtctgcaaagcgccatcaagcaggagctgcacagccgggccttcctggccatcacgcggtacgggcatccggtgcactggtctgtcttctgggctttagttttgcctttagtccagccagaccctaggggacatgtggacatgtgtagatacctttgtggctgctagaactggaggtaggtgctgctggcatcagtaggcagaggggagggacacaggtccgtgtcttgcagtgcacaggacgggcccatgacagacaactgtctgccccagaacatccccaggataaggctgagaagcccaggtctagccgtggccagcagggcagtgggagccatgttccctgggtctctggtggccgctcactcgaggcgggcatggggcagtaggggctggagcgtgtgactgatgctgtggcaggtctgaggagctctggccatggatggcccacgtgctgctgccctacgtccacgggaaccagtccagcccagagctggggcccccacggctgcggcaggtgcggctgcaggaaggtgagctggcagggcgtgccccaagacttaaatcgttcctcttgttgagagagcagcctttagcggagctctggcatcagccctgctccctagctgtgtgacctttgccctcttaacaccgccgtttccttctctgtatatgagagatggtaacgttgtctaattgatggctgctgggagggttccctggggtggcgccgaaccagagctcaggcgagctggccagcaggaaacactcctgttgggttttgatgaggccctggccccggcctggggctctgtgtgtttcagcactctacccagaccctcccggccccagggtccacacgtgctcggccgcaggaggcttcagcaccagcgattacgacgttggctgggagagtcctcacaatggctcggggacgtgggcctattcagcgccggatctgctggggtgagcagagcgagggccccgggcgtctacgccaaggacaagggagtagttctccaggagtgccgcggcctcctgaccagcctggctccggggtgccggaagggctggggtgcggcacccacgccacccctctccggcagggcatggtcctggggctcctgtgccgtgtatgacagcgggggctacgtgcaggagctgggcctgagcctggaggagagccgcgaccggctgcgcttcctgcagctgcacaactggctggacaacaggtgggagctccctcccctgccctctccggggtggccgcagtcaccagccaggagcccaccctcactcctccggcccccgctggcctaggcggcttccacagcccctcagccacgcctgcactgcgcggtccccgcagctcccgccctgccacccgctcctactgacccgcaccctctgcgcaggagccgcgctgtgttcctggagctcacgcgctacagcccggccgtggggctgcacgccgccgtcacgctgcgcctcgagttcccggcggccggccgcgccctggccgccctcagcgtccgcccctttgcgctgcgccgcctcagcgcgggcctctcgctgcctctgctcacctcggtacgcccgtccccggccagaccccgcgcctcccaccggcagcgtcccgccccctcgcggggccccgccccggcagcgtctcacccctcgcagcgccccgccccctcgcagcgtcccgccccctcgcagggccccgccccggcagcgtcccgccccctcgtagggccccgccccggcagcgtcccgccccctcgcagggccccgccccggcagcgtccctcccgccctcctgaccgcgccccccacaggtgtgcctgctgctgttcgccgtgcacttcgccgtggccgaggcccgtacttggcacagggaagggcgctggcgcgtgctgcggctcggagcctgggcgcggtggctgctggtggcgctgacggcggccacggcactggtacgcctcgcccagctgggtgccgctgaccgccagtggacccgtttcgtgcgcggccgcccgcgccgcttcactagcttcgaccaggtggcgcagctgagctccgcagcccgtggcctggcggcctcgctgctcttcctgcttttggtcaaggtgagggctgggccggtgggcgcggggctgggcgcacaccccagggctgcaagcagacagatttctcgtccgcaggctgcccagcagctacgcttcgtgcgccagtggtccgtctttggcaagacattatgccgagctctgccagagctcctgggggtcaccttgggcctggtggtgctcggggtagcctacgcccagctggccatcctggtaggtgactgcgcggccggggagggcgtcttagctcagctcagctcagctgtacgccctcactggtgtcgccttccccgcagctcgtgtcttcctgtgtggactccctctggagcgtggcccaggccctgttggtgctgtgccctgggactgggctctctaccctgtgtcctgccgagtcctggcacctgtcacccctgctgtgtgtggggctctgggcactgcggctgtggggcgccctacggctgggggctgttattctccgctggcgctaccacgccttgcgtggagagctgtaccggccggcctgggagccccaggactacgagatggtggagttgttcctgcgcaggctgcgcctctggatgggcctcagcaaggtcaaggaggtgggtacggcccagtgggggggagagggacacgccctgggctctgcccagggtgcagccggactgactgagcccctgtgccgcccccagttccgccacaaagtccgctttgaagggatggagccgctgccctctcgctcctccaggggctccaaggtatccccggatgtgcccccacccagcgctggctccgatgcctcgcacccctccacctcctccagccagctggatgggctgagcgtgagcctgggccggctggggacaaggtgtgagcctgagccctcccgcctccaagccgtgttcgaggccctgctcacccagtttgaccgactcaaccaggccacagaggacgtctaccagctggagcagcagctgcacagcctgcaaggccgcaggagcagccgggcgcccgccggatcttcccgtggcccatccccgggcctgcggccagcactgcccagccgccttgcccgggccagtcggggtgtggacctggccactggccccagcaggacaccccttcgggccaagaacaaggtccaccccagcagcacttagtcctccttcctggcgggggtgggccgtggagtcggagtggacaccgctcagtattactttctgccgctgtcaaggccgagggccaggcagaatggctgcacgtaggttccccagagagcaggcaggggcatctgtctgtctgtgggcttcagcactttaaagaggctgtgtggccaaccaggacccagggtcccctccccagctcccttgggaaggacacagcagtattggacggtttctagcctctgagatgctaatttatttccccgagtcctcaggtacagcgggctgtgcccggccccaccccctgggcagatgtcccccactgctaaggctgctggcttcagggagggttagcctgcaccgccgccaccctgcccctaagttattacctctccagttcctaccgtactccctgcaccgtctcactgtgtgtctcgtgtcagtaatttatatggtgttaaaatgtgtatatttttgtatgtcactattttcactagggctgaggggcctgcgcccagagctggcctcccccaacacctgctgcgcttggtaggtgtggtggcgttatggcagcccggctgctgcttggatgcgagcttggccttgggccggtgctgggggcacagctgtctgccaggcactctcatcaccccagaggccttgtcatcctcccttgccccaggccaggtagcaagagagcagcgcccaggcctgctggcatcaggtctgggcaagtagcaggactaggcatgtcagaggaccccagggtggttagaggaaaagactcctcctgggggctggctcccagggtggaggaaggtgactgtgtgtgtgtgtgtgtgcgcgcgcgcacgcgcgagtgtgctgtatggcccaggcagcctcaaggccctcggagctggctgtgcctgcttctgtgtaccacttctgtgggcatggccgcttctagagcctcgacacccccccaacccccgcaccaagcagacaaagtcaataaaagagctgtctgactgcaa

SEQ ID NO: 2 - DNA, 128315 bp, Homo sapiens
  source 1..128315: mol_type = genomic DNA
ggacacagcgtccggagccagaggcgctcttaacggcgtttatgtcctttgctgtctgaggggcctcagctctgaccaatctggtcttcgtgtggtcattagcatgggcttcgtgagacagatacagcttttgctctggaagaactggaccctgcggaaaaggcaaaaggtaacagttactgtctgtggtttaaaaatgaggtgtggagcaaataaacaggttggaagtgtggggtggggtggtggggtagggtggtggggcagggtggggggttgtgagcagtcagtgggcttgtcgccgattagcactgaagcagtgtttagctggacggcctttctgtgggcccctctgacagtgcccttcccaggaagatgtgtttctctgtcctcagccacatgaaaatcttttgcctaccgtgcctgtcaatccattgcctgcccgcccctcccccaccccccgttttacacctgcctgtccagtctaccgctctctagggcatccacgctgagcagtgggaagaactttaagccctgaagagcaggccaaaggcaagcaagaaccccctcgaacagcttcccagcttagtgaggccttatttcattgattctctgaggcacattgttttttcacatgttagcatttctgaaattgggatgcagctcacgatcaagtcacagtttaactggacacattatttttctttcttagtggtgcagaaaagtaacagtgtgtcttacaattgactgcgtcctagattctgtgagatgcaatacgttattaaccatcacgcacatttcctgaactctttcaatgagcagacaccagcctgggttagactggagccctaaaagcacgacacagattccaccctggactggcttctgttctgcctgggaaaacccaaagtacgtttggagaccaagagcaacataaagtagcataggtggaatagtccatgagaagtgcgagcaaaaggtgccggagatcagagaacaccaagactgtacttgtaaatgacaactggctttgtgcaattttttctgggaaaggataaggagtgactatagaactgtaaagaaagaatgcactttgctacagccttgcagagttgtgcaaatgccgatgactaaaggagctgaaagaggaaggaggggataagggatgggggctgggtaggggtgagattaggaccctgggagctgcaagccactggagagatcaggaggaaagggagggagacctgctttaggcgagaagagaacagtatttgttccaaatctcggttcagaataagttcatgtaggtgatggggccaactggaacaggtgaaggcctatgaatgagtgtctcagttagggtctccttagagtttaatatgaaaaggtgttagctaagtacagagctggtacctgagagagtaaaaggaaactctaaggtatcatggaggtagcaattgcaggacacagctcccacccctagggctgagagaaccaagggaagagacaggaattattaagacttggagcatagatgagaggtctgtggagctgacattaggacttgggaggaaggcgtgcatggaggctgctgctggatctctgaacctgacctcgggtctggacccctgaggagaaagccctggcaggttggtgcatgtggggccgagggacaatagcttaacaaccagcataaaagagagcagcatgggacacgcttcaaccatgcgcatggatggctccaaaacctgtgtgtggctggcccaggacgcagggaggctgcagggggaagagacaagttaaacctgacttgtctgggaagcaccattgtcctcaggtcactttcctctgtcaagcctggtgctgaagttatctgttgtctccaggggccaagtattaagagtaatcagaaactcagtcctttcttctaggagcttcccttcttgcatgaaaatcctgataaaactggaaaaaaaaacctcatgattaaattttttcatgtattcattctttccttctatcaaaaaataatctccaggcaccgtgctaggttcattggtatacaatggcaacaagacctcccagcccctgcctatgtgaggcatctgtggactgcggaggaaaatccaatatgccattgttctctctttcccataagaaattacaattctcagttcattttattctcactgtgctctttgtgaccctcaaagggggtcacatgataacaggactgtagctgctggcctaaaatgagcccattcctgtggcgctcatgtcgctgtgacagagaataaccctgttttcagaatgctctggtgccctccctctcaatctggcctttcgctggcatgggtgggcgactcctgctcagggactctgccttctccacagtgtgctcccagggagatggagccactcgggctgagggccttggccagggcacctcccagggctgggcctggtctgggctggcgttcactggatgccatcctgatggcctggaaattgagatttctgtctggcacgcctcccgatggctccccacctgctaccacattccaggagcttccaggatgtctgggtaagacagaggcacccccaacagattcagtagctctgagagggatctgtggctccttcctaagcttgcggttcttctggaaacttctgcctctagaagatggtccctctaagaaaagtacaaccacccagcccataattcagctcccaggttttccctcaaacctccatgtctcctgtaagcagagcaagagtaaaatcagataccaaatttcctcattcctcagctcccaatccctaagggcataagatgaaaatcttcagatctctgctttcctccctctttttttcttcctctgttaacatttgtcaagtgttactaagtgtctggcactgtactaagtgcatcacctccctgaactctccgaacagttccacgagagaggcctctctgtgatccccccggtactgatgaggtcactgaggctccagagaaggattagtaactggtggggttggacctgggattcacacccatgctgcgtgacccaggacaggcaggcatggccgttacaccacactgacccccgtggatcgagatctatccaatagtctggtcactgatatcactaagatagagtggccatataatttatcatccaatcagggcagttttgcaagtgaaagggagcactattaataattgcactgggacaataaatgtaaaccaacactggacctggaaaactgggacgtgtgtttgccctataccaaggtaagctagacacagccactgccttcatggagttcagaaccaggcaggggcggctcccacgtataattactgtgcagcacaacgtggagaccgtggagtagaaggaaacacggatgggaggtgaggaggaggtctgtgagctcagaggaggcaccggggctggagagggtgagagaagacttcccaaggagttcatcctgataacgtgcattcccaatgacgagcgctctctccactgcacaagacaagtatacatctgcccgtgttggctgtggacctggcgctgtgtcagggagggtttatgaagatcactaggtgggtctcttggtgtcatcccttcatcccagcttctgggttaggatggatatctgtgggggggcctgaggactcatgaaagtggggcgctaatcatgttttggacaccacaccctggagcacctgggacagctgtggcctttgtcctgggttcagcatcaagccgaggatgtggcaagtaaagagaggctgggcaccaactccagtgtacccaggctccgggtcatgtttgtccaggctaagaattctgtcctggttctcagtgcagaaggaagaatcatggggctcattttaggccttggctgccttctgttaaattgaaaacagagcaggaaggaagaaaatttaacaggctcagttctaaaacaacaagcacaactgtgcccttgccagaaacccctcctccccatgttgattgaatggtaaagagaggaggggaggtgagagggagagagagagagaggaagagagagagaaaggaaagaaaggaaagaagaagaaagaaagaaaaggaaagaaagaaagaaagaaagaaagaaagaaagaaagaaagaaagaaagaaagaaagagaaagaaagaaaggagggagggagggaaggggaaaagaaaagaaaagaaaaagaaaaaaagaaggaaataccagtttgggaaaaaagaattttccaccagcccttctgagccttggctgggcttaattaaagttacagacatgtgtaaagggcagggtagggggagtctgagctgctgagaaaacatgtttttaattatactgtggaatttctccctggggtatgcctgtacgcagttaagcgtcaaggacagggatgccgctctggggaggggaagctgagcatgattttggaagccggcagaagaggctattgtgaaaaccagacctgtcaggctaggaaaagaatggctggtggtctttgaccagggagtgacgcgtgaaatgcagcaaccgcccccgccccccgccaaaaacaaacacactctcacagagttagaacaacagtgacctctcaacaaatatttttcaaagattaccaaccaaccattacctagagcagcggttctcaaccttggctgcacggtggaactacctgagacgtgttaaaaagaagaaccctgatgtcccatgccccaagattctgatgtagttgatctggggtatgatctgagaccccggcatgttttcagcctgcagccacatgagaagtgctgacctaatcaacaggggtgatgatttgaggggcggggactataggcaaaaaaaaacagcctaattcaaggatgagaagagggcacaggtgaggtgggaacagtcctagggccagacaaagaaggaagggagaaaggaggtgctgatccctcccctactcctgagaggaggcctttaagtcaccgtgccttgtggagaccagattcttcaaaaatacaagaatgagtgagtgagggagtgggtggatgccaggagagtgcgtgacaagccttgcaagggaggatgacaatgcactagcttggtttggaaattttacccctggaacaggcaggccaagctggctggtcccctccctgatacacagccctccctctttatatatggagcaggggacggtgtgtggctggtttcttagcaagcaccatggttccaagttggcaactggggagttctgaatccaaaaaggagggagatgaacgtaagtggagggcaggcctacaaggttgcagataagcttaattctgtctccttactcttctgcctttgcaacaaccctgtgatcttgcgacaaccctgtaaggcaataacaaatggctcatgtttattgagtgttacctcatgccatattgtgctttcgtgtttaacacaattgtctcatttcaccctcacgactgctctgggaggtaggtcctggtatcacatccatttcacagatgagaccatttggcacggaagagttgagtgggctgcccaaggtcacatagctaagatggaacaggctggataggaaccccagtaacttgacctcagagtaaccttctcttaaccctgagtgtacactgtaggaaaaatgagcagtcccatttcagagaggacaaaactgagactcagaggttaagcaagccccaaagtggttgttaacccagatcttcccactaactcccaaatcagcatcagtgtttaacgtaccagacctctcccagatagatgttgccgcatggaagacagccgatctacgtgatagaaagccaatattgcaagcagtcgtctaaaggagtcaaatgtgttggatttgaactggatgtctcatttctttggtgaagacactggaaacaacttccaggtttcatcaattgctcctatcactcaacgttgctatcttactgaacttgttccccagccttacccactgatggaatgatccagaatggaagacaagacaccaatgtacatgaccctgggggaggctgtttcttaaatctacagactgttggtgacctgagccccatgtcaccaaaggctttcctggagaagcctcctagaccagtcttgacaaaggctcactcattccgtggatatttattgggcacctattatgagttctgccccatgtggggtgctggaatcacagtagtgacaacgacagatgaggttcctgtcctcaggaagcttactgcccttgagggcttcacttacttggaggagtgatgaacctgaagtgcggtgtgtgttaagaagcggaagtccagggccaggcgcggtggctcacgcctgtaatcccagcactttgggaggctgaggcaggcggatcaccaggtcaggagatcgagaccatcctggctaacatggtgaaaccccgtctctactaaaaatacaaaaaaattagccgggcatggtggtgggcacctgcagtcccagctactcaggaggctgaggcaggagagtggcgtgaacctgggaggcagagcttgcagtgagccaagatcgtgccactgcactccagcctgggcaacagagtgagactccgtctcaaaaagaaaaaaaaaagtgcctcacggagagtctattcttttcttcccatattgtgtgtgtgtgtgcgcgcttcctccaacacatcctccctatatatattttgagtaaaacatcttgtaaaaagttacagctacataatcaccacctgtccctaaatagtttttgctttttctttcttcaatgcacgatcattttcccccatcaatttattttttagtttcttataatcttgttgccagtaggctgttttttaaaaagcagaacatggtttgttcttactagcaggaaaggagcatttattgagcctctgctatggtgtcttttattttgctgagagcctatttacatttctttgagaggaaaacaacaaagggttacatgaaagaccatgtgaatagcccctagctgatctattaaacttgctattccccggccagctgcttcagatctccttcagatcttatgtgtttccttcctaaggtccctggagtaagggttgcatagacctattctactctccaactcacatgtccctctccctcttcctctccataattccacatctccaacccccacccctatgtgcaatgccacagggtgtggactgccacagccactggatctgcttttggaatcaagagtccttaagctccaaatggaaccgaaatttaaataccaactttcaaccatatgttaacatcagcagcctcttccaatgtaaaaacccatggcagtgtgccctgctttgtttctttaagcaatagaaacttgaaggaagcatgttggtaggccagatttttgttggctttgcaatggatcacagtcatttattcactcattcattcactgattcattaaatgaccacatttgcaagggcaaggtaatggggagggccagaaaggacactggccccagaaacaggaggctggattttggttctgatgctgccactgctgatgtgacactgcacaggtcacctgcctcctctgagcctctttccttaactgcagagtgagtggctacagagaaatctttactacctgttagatcagcattacctgggagcttgttagaaatgcaagctctggtggggccatactgaacccaaatctgcattcatgtgcatagtgacagctaaaatgcactgaagcagatgatcttgatgatcctttatgaaagtctcatgctaatgcagttttctaaaatagaggcagagtggaacccagatggacacaaaatctggttgatataataaaacaaggtagagggtgtatggtggggagggggtaaaggaaggaaactgtttaggtaaagataccacaaccaaagtcctactgcacacatgggatctgaggagggctgtgtctgctctggttacgttttctataatctcttagcaccactgaactttctctctttttgttttgtttttccagattcgctttgtggtggaactcgtgtggcctttatctttatttctggtcttgatctggttaaggaatgccaacccactctacagccatcatgaatgtaagcatagcagggtagcttgggcaagccctgaagagactttggtctgggccttttgtctagaaagatcttggggtgggagtgtggggatcagatctgcttatcatcatttcatgtctatgatgcatgtaacagatttatcaatgttacacaaattataatttttaaaaagtctttagagacagggtctcactctgttgccgaggctggagtacagtgttaggaccatggcacactgcagcttctatctcttgggctcaagtgatcctcctgcctgggcttccaaagtgctggaattataggcatgagccactgctcccagctaatttttttgttttttgtggagacagagtcactacattgcccgggctggtcttgaactcctggcctcaagtgatcctcccacctcagcgttctaaagcactgggattacaagcatgagccaccttgtccagcccaaattttcatgttttaatcctacacattctaagcaaatacttgtgtgtagttactaagggactgtgcacttatttttgtttgctttgttgttgctagtttttatttttttatacctaaactctctcgttttaaagagaacagatttgtagatgagttctcgaaaatatttcaggaatcaatatagagaatatgttatacatggtgccagagaaaaatgaggacaagagatgctatacaatcgtactgaagaaaaattttatttcttggacccctgaggtgtctgcagacctgaaaggaacctagtgagagcctcttttacactctgcccctgtgggaaagccttcacctggtttccggccctctatgtggtgaatgtggaagcctcaagcgttatgcaaatctgcccagtcctctattcttgatcttcaccttctcgttcatgagtttcaggccccagttctgaatcagcctcctgtccatcagactcttctttacctctccccgaggagcccataacctgcagccctactgcatgcttggggtaggtgctcagttcaccgtggttgaaggaatagacgagcgtctgctcaagcagcagcagcaactgcgtggagtcttcttgaactaacactcctatgcccctctcggcacaaaatgacgtgtccccccttgcttccccttcacatttccacccatgcctattacaacatccgtctgtctccccactacaccgggagcttgagagaagaggccatgtctctagcacccagcacagggactggcacacatgagatgctcctgcttcttaaatgctgagaatgaaggaggacatcagaggggcccgggccccttcccaaaaaggccaactcctaggtctgcatcctgcttggtctccatgactaatcccgtcttgtcctcattttctgttttaaaggccatttccccaacaaggcgatgccctcagcaggaatgctgccgtggctccaggggatcttctgcaatgtgaacaatccctgttttcaaagccccaccccaggagaatctcctggaattgtgtcaaactataacaactccatgtaagtgttgagatccctaccatgcaggggaggaagttgcacaccccttcacgtgctgaaatgcacacgtgcgtgcacggagcatggagcactgagtgttcttgtggctttgctgagcccctaacctcttaggagcagagcaggtttcctctctggaacattctgttaactgtcagggcacttggggagaaatctccaagctaaggccacgtgcacaaaatttcttggtccttatatccccagaatgtgacctggagtctgatggcagcccgctgcagagatgtgtccactgccttctggtcattgacctgcttgggtggagtgaatcattgtaggagaaaaactcagttccctcaccctgatcaacctggacagatctctcttcctttaaaagctttcttggacatctaagggctaggaaaaatgtcagggagcattgggaaggtaaatgaagtcaggtttacaaagtcaagtttacttcttgggagaaaaatacaatttccaaatcctctgttataattgccatcggccccctggagtggtgagatctcggaatatggctcgggtgcagtggctcttcactgtgggcctgcaggctattctgaaaagctgatgaaaaccaatgacccctcttccaagaaaaatggccacataccaaacattacactgtacatctgatttcagggaattgtagatgccaggttagtagcctcaggtctagggtcaaaattcaagtcgaatcccacaggaagagggtctgccttcggaattccctttcagagcattgggagaacatcatgggagcatattctagagacagaggcttagggtgtggacagggccatccctcacccactgtgctgaccttaagcagcaccttgtgcagcccatacctgaaggccaccagcaaaggcctgttggggagcaggctttacccgacctgtataaacaccaggctaggtgaaaactgagatacctggttactttagttttttccttgggggagctcagtatgattcttccaggagaagcctgcttttagactaaaaagaaaaaaagtttgataggtcaacctaatgattggaggtggccttccccactgtgaacaaactatggctgcatgtgccctacaatggcagagttgagtagttgtgatagagactgtatgatctgtaagcctgtaatttttatgtttgctgacccctggattaccagatgatagaagaggaaacatctgtcttcctagcaaagtcaaggaagtggcatttagcaggactcatattgctgcaagcactgccttgcagttttagtttacaactgcactttcagcttaagaaacacctgcccatccagagagatcgtgtggggtcacatggtgggatcagggaggcctgaagacagctcagtggaggctgcatggagctttggtgggaacggccctggcagtgtctatagatgttattgcggaaaactgaggggtgggagttggagaagggggctccagactctagctgtacttggcatttgaacccggaaagttgggtttcatgttttgcactcacattatgagtgaaatattggcttattcaaggttcttttgcttgcaaggcacggaaacccattcaagcaatcttaaaccccagaaggaaatctatgatttggatactagacattctcacagagccaagggcagcaaggcggggctcaggagaggcaggccaagacctggagagctgtcaggagctgcttcctcaactctcttccatctgggcctgccagccctggcctctgtatctactccattcacctctctccatggaccagtctcccctgctcctcaatgcctgggctgccattgttcatgcaattcacaatacctcggcctgggcaatcagaagctcatctctgaacaccatccaaattcctgggaacaaatcgggttgacccagctttattctccctgtcccatcagccttggcagaggcgtgcatgtgcatgcgtgccaatgtgtgtgtgcagggaggtccttgtggatgaagcatggctgtcagagcctacctgcgtgaatgggtggaagggcaggtctcagagaattgggtaaaaactggataaaccctccagtgatatccaccaatgtcaccctgtttaaggcttctctgggcaagagacacacagagcatgggaccgagaggcgagcagaccctgccaaaactgggagactgaatagatcgctcaccatccttgtcagttagcctatatgtacaaggaagtaaaattatctctttctcctgccttggcagtattgtaaggatactcaatgtagtagctaggccagacacatagtatctttaaatatagcatgagatggccaagcacggtggctcatgcctgtaatcccagcactttgggaggctgaggcgggtggatcacgaggtcaggagatcgagaccatcctggctaacacgatgaagccccgtctctactaaaaatataaaaaattagctgggtgtggtggcgggcgcctgtagtcccagctactcgggaggctgaggcaggagaatagcgtgaacccggggggcagagcttgcagtgagccgagatcacgccactgcactccagcctgggtgacagagcgagataaaaaaaaaaaatagcatgagatattattactgttataaaaataacagctatttccttattaatgaggctttgtccttacagcttggcaagggtatatcgagattttcaagaactcctcatgaatgcaccagagagccagcaccttggccgtatttggacagagctacacatcttgtcccaattcatggacaccctccggactcacccggagagaattgcaggtaagcatgactgcagtgctctcaagcatcatttccctcacctatggagagactgaagatataggaaagaacagggagagttggtgaaaaatatactagcggaggcaggaagggatggggtctggaggcggcttgaacatcaccttggtgaagatgcctcttcctccacagaagcctggaaggtaggaagttgggaaggaaggcaggaaaggtctcatccacgttaagtctagagacagaaagaatgctaagagagatggcactatgggaagtatgaggctaggtcaagggctagaagcaggggagacgagtttacagagtttcgtaaagatatagagcaactctcacagagttctagagcgagagctaaccaggaacatgaagcagcaaggccaactatcattaaggagccagggaggtcagagatcatgtattatcatgacataaatatgcataattgtactatttctcccagtaatatttagcacccaggccccgaggcagagcaagtggagagtgggtgatgcagggctgggggtgtgtatggaggcaccacagaaggtcaacaggcagcgggctgaaggcagggactggactacatgcatcaagtccaggctgcacgaggaaggatgagaaggcagatgagcacggaaatggactgggggaaatgaagaggcaagggaatagaagtctcagtgggtgccatgaccctgtttaagtgattgagaaaatgaacaagatgaaaaggttaatggctgtggtcagaaagtgaaatatgtgaattcaggatttcgaaggtagggtgggtgatgactggcccccagatgcggccatggtgaagtggggcaaaggtgcaggtgcatggtgaggggaaggaggaaatgggaggtgatgatgttggccccacacggacaccacggttgtgcaggaagatggcaggagctgggcaccagggtgggagccacctggagtcaggaagagtgaagagaaaggatgaagaggctccctctcctgtgtctctcctccccaggagaagaacaagaaacaatccgaaagtaataacaccaatgtgcctttacaaagtgtgagtgggtgttgtgtgctgtcacgtgtgtagtaggctcctctgtggatggctagagggactggacatggccactggatcccacttgcaagagcagaggaaaagagtggtcgtgaggaagtaaagccccccaaaatccaggggttgctgcagctttgggtgtggagcgtgccctctgaggaaaggctgctctgggggagattgcccaggaaacggggctcagaggccacgaaagcagctgttaggggcttctgggagatgtgtgctcctaggattagggagttgactctaaggatgaccttagaggttaacagggatgagaaaggggtcaccaaggggtctaccaggggaatgggagaggctgtattgatagaacagcttctgctgcaggttccaaacaagaaatgtgggagaatggttgaaatcagccccgggggcaccttcccgtgcatgcgtgcagctccttcaacattcagtcgaccttcagtgcctcctgtgagccaggcactgggctagtctctgggggtggagagatgagtcaggcaaatgccagccctcagagggctcacagggcagaaggtgagagatgagtgagcagaaaatgaccacagcgcgtgtggggcccagtggagggaaggaggggattcaggagcacaggagagtcaacaggggaaacttctccgaggagaatctgatcctcctcccatctggccaccttctgaagccctctctccccatccaagtgagaaaggacaggcgtatgaccagattggtgtatgaagatgctgaattacgttctcattgtttcaaactagtaaaccatagattttatgtagtaacttctacaaactgcattacaaacactccattctttgttgccctgggtagaagtttattttagtgagcccaagtttgaggaaccttatatggtatgagtacaattaccattttaatagtaagaaatcccccttcccctgtgtaccaaccagaaggtgtttttttcctaatttaaacaaacagatgcagacgtgggctgtccagctcctggcgggatgacatacctcatgcatccagtgggtttgatgatgaggcagacatttcacttaagtgcctgatcatcagattgagtcctgctgggaggaagtgtgaaggaagtaatttcaaaccacagtttctctgtggcttttacaatgtggatatgagaaccaaaatcactacttcttaaccccagagcaggactgattttgaattggtatgcaggcggttccttctgcaggcttcgggctgtgagaagtccctaacagagcaaatctggggacaagggctcaggaaaggttggccacggccccctaggaatgggggctctgcaagatccctggccttagaggctgtgagagggaacaggggtccatccccaagtaagggacacggtctttgaggaaatcccaggccagggcctgaagggcactgtcaggaacacaggctgtttcagtctgttgagattcaccggggcgctgctcactgtgagcacggactcctcaggccaatgtggcagaagagcccacctttgaaagcgagcgggtgggggtggcggggctggtgctggtgcgtgcttctgcacagccacctgggaaggtatgccgctggttgacccaggcagaggttttctttcatggcaaacctgcagtactgcattctcagcagggaggattaatggtaaaagaccaggcatggagcccccttccctctccctcgaagcaagctctgtggtctctcaatcatctttaaaacaccttcttcccgggagcctcctacattctcctggcttccctcccacccccaccctcagctcctggggcctcagcagccccacccccaagcctctaatcttcccagggaagggaacaagaagaaccacattttaaacgaaatttatttttctttcctcaggctcccagttcacatttctccctcaggagtctagggaagcttctgtctggtatcggcctcctcttcacctgggcccccgccctcctcaggtgtaccagaagccagcacactcccccttcccccccagagccacagcagccctgtctcctgggtggtcttgtgtgccaagcctgggcaacatcactcccagcttttcttgttttgccccttctccccagcaagatatttgtatgtaaggtcaggtgagtgagttaaagaataacgaagagataaacagtcaaatggagtcctgactgtcaggtcaagacaacagttatttactgaatgcctcatgtcattcaacagacatttattgagactctgattggatgtcagtctttaatgctgggtgtcagagagaggtgacttcaagggcttgcatctgtgcacccagcattgctaggtacaatgaggagtataataaaagcaggagccatagcccccaactctcaagagatctcccatgtgtgtatgtctgcatatgcgtgcgtgtgcatgtgtgcgcatgtgtgcatgtgtgtgtgcatgtgtgtgcatgcgtgtgtgtgtgcgtgtgttggggatggtgttggtggagtgagagtgtacaaggctgtgtatgaaggggtaattgggaaaagaacaatggagctggcacccagggacaggaggaaaagcaggagggctgggtttggaagacagccggatttatgtttttgaagagggaagactagaatataagggagcagcccttctcagagccctcctcctcccttcgggccctgtgtccagctttccccaaagtccttggatctttcctatgcaaaggggagtgacagtgggcaccactctcagggaacccattactgtgagagaagccactgtgccactgtgtggtcgaacttcaagaccggcttcccctgccccagctgcatggacaggcctgtggggttggcgcaagacccttccagaggaaactagctgcaacataaatccggatatggtgctgttcagggaaaggcacaacctggggatgagaagggtggctgtccagcacacaggggcaggcctcttggccactgggggaggggagaatttggagaggaagaggatgggatgccgtggaattgggaccaggaaagaatggggacatgtgatggttaaagctagttagagaagaactgggagataaacagtcacccatgcccctgaagcactcggggtgaagagattggcattttcacgcaccccagtgctttccctttgtgttgaagtcccttcgtagacatccaggcccataaggctcttctctggccagagcctcatgaactatagcactagcagggttgaggccaagcattggccctggaagccagccgaggaggagggtgcttgtgtgaatctcccaggaggggtaagaattatattaattcgatcataataagcatttattgagtgctgttttgaggcctgggagctaagcacttcacattccttaccccgcatcaacaatcctatgaggtagatgtggaaaatgcagacacggggacaggctcaatcacttgccccaaggtcaccttaactgttaggtgttctttatgcctccttataaagaaaccctgcttcccacaggtgttgagaggagctggagggagcttgactagggctcatcaggcaagccccggcatgtgcctggctctcctctttctacctggagcttttcctgcccttaatggccccaactcatttctcttagtccatgtcagtgccctgagcatctcagcccaagctgagatgatagaaacacccagaggggtcctctaccctgtgacagctgcggtgtgggaagagcacgtgtctcctccaatcctagaccagagtttctcagcctcagcatcactgacacttggggctagataatcctttgtgtgggggagggaggagtgtcttgggccttgcaggatgtttagcagcatctctggcctctacccaccagcacctccccagttgtgacacccagaaatgtctttagatcttgccaaatatttccaggaggatgaaattcccctgtttcagttccccagccccacctcaatgagaagcactgtcctagaccaaccccacaaagcatctgacacccccatccagccctggctaactttttccaccttcttactaaattgggcccagctgcttcagcagtcaatgtgttgggggcagcccactggcaagagcctcacctctaggggctcccagagaccccaagaacagaaccttcctctgagagttgagttacaagtgtttccaatcgactctggctgttttcctttttttgacccatttccccttcaacaccctgttctttctcttattcatatgtaggaagaggaatacgaataagggatatcttgaaagatgaagaaacactgacactatttctcattaaaaacatcggcctgtctgactcagtggtctaccttctgatcaactctcaagtccgtccagagcaggtagggggatgtcactggccagtggtccctggaggggagggaagcacccagcctgagaaaggcaagaaatatattggcttttttcttctttcttccttgtgttcacattcagaatccatcacttaatgccttgtatttagaaaaaaaccgggggatcacttgagatcgtgatcattttcaacataggattcgaagctgtacacatcctggtgaccttaaaacatctcaggtttttataactggaaggaaccttagagatcatggggcacaaccttctctttatagatgaggaaacagaaatctattcatttattactcaaatatttagggacagttgtaggtactagaacacagtgtgaaccagacaggcaaaaccccaggccagggagcttccattccagtggggccacaggcgatgctcaggtaagcagagactccgctgtgtgacttctggctgtgatgggtgctgcaaggaaaatccggtagagtcgagggttagagagggacggaggggcaggtttaagggggatgctcaggaaggccttcctgaggaggtggtatttgagcagagttgtctgtcagccacacagtaagtgagaggggagttccgggcttggaagctgccagcacagtgctggcaagtgctggggtggcgtcccgaggctacagaacctgagatgctgcagaagagcccacttctgctttcctggaccacttccttctcagcaccaggcaaactccttcttctatcccctggcacatttctgacctgtgtatacgcccccaatttatctaacccctttaaataatctcctctatttatgcagagcattcttaccactaactcacgacttgcacatcccttagctcccttactcctcacaacaatcctgagatgggtcagagaaggaggcttgcgcgtctggtgatggggtgatttgtgcacagttacagggctagaaattgtcagagccagatggaatccaggtcctctcaatcctaatccagtgtttcttacttcagtcctgtggctctcaaagcccagagaccagcagcatcagcgatgcctgggagcttgttaggaatgcaaattatcagggcccactccaggtgaactgggtccaaagccctgggataaggcctagcaatctgtgcttcacaagccctccaggtgattccgcaggctcaggtgtgagagctgcagctgtcctctgggccttctgggctccccgcccagcttcttcagtgtgatgaacacagcgagaatgctagatctgcagcagctgatatcccagacaccctcccgactccctcctggctgggtctgatcctcctccagactccaggagagaacgagacataaacagaacttcagagcctgtgttaaccctgagatcaaggtctgcacagggtgctgtctgagtccagaggagtgagggaccccaccccacctggtcagcaccagctcctggaagcaggttctcacactggttccctgcacaatgaaggagctcatacctgcttttctggcttctcagaccctgaggttttcaccgaaactagacaaggggaacctagggtcagcctggaggcagggtgagcttggcgcctgcagtgcccaggccctgggtggtgcggctccggccaggccctgtttagcttcctctcccacccccacagagggggtgctgtcggcaccgattgctcattttcccctttgctttctcttcagctcgtaaaactcaagtcctgacaatgccttgatgacttccagttggtaataaaagggagatgaagataaggacaggaatttcggggaaatttctttccagttccttactaatgtgacatttagatctctagtactgtgcttctggcatcagtgccaaggcctttcatgttggagaatggaggccggggtcaccaggttgtgcctttatttcatgttgctggctctgatgagctgatgctctgctgattagcaaacgctgagccatctgcgcttcgcagaggcacgttccagccaacccggccctccctgcccacttcccaggatgctttgccttgtgggctcacctgtcttctagctcctgatctgtatctccacctccatccagttccggggctccttatcagcactgttcccagaactgtccatcacgatggcaacgttctctctgggcgctgtccaacatgggagctcgcctctgtgttgtcactcatgctcattgaacatggatttgtgtcctttaccatcaggactggatacccctcctggtcctttctgcctggggtcttagcacagctcagaaggaacctcaccattccctctctccatctagggaattagaagatgacaggggcacagttctctggctcacccccagcccagtaaactcctggacatgcttcaaggcccagctcagatgttgcctcctcagtgaaataatttataaacccacccttctttgtcctgccttctccctcttccctactcactggagagttaacaggtgatggttaagctctgggttcaaatctcacaaggccacacacttagctatgtgacttcaggcaagttaattaaccactctgtgcctctcgtttcctcatttgtaaaatggaaatagtaaaagtgcctaccagcatggcagttgaagttaaaagaaataatatatgtgaacacttggaagggcgcctgacacatagtaaactctcagtaaatactagctgcttttagtggctattcttaacacaccctcttcagtgctctggtttcactatgttttatgggtccctgagatcgaaagtgtccacaccgactcatggtcagctgtaacctgtgcctcgtgtggggaccaggctgccatgtgtagtctggacagtgtaggaggtggcagagctcaggcctgttctgccctccagcccagagagccacgtcgttagatgtcatgggagactgtggtgccccgggaatctcacgaatttgcccacggtactcagtgtctgtccaatgctatgggagtccaggactctaggagccagttaaggtgctgggtggccacaggtccctggccaaggtccaggcctctcccctgccacctgatcctcgagaggccatcacgagggttgtacttcaagaaccactatccttgagctacctaggagctgcagaatgtgcactctgcagggcttagggcctgcagacaagatagatgcagggtgtctagttaaattcgaacttcagataaacaacaaataattttttcaaataattgtgttctattcggtccctatttgggacatatttgtactaaaaagtattcatttatctgaaattcagattcgactgggcatctggtgcttttgtttgctaaatccaagagcaaatttgttctagctacttctcaaccccaccttcagagaggaagccttgatggtactgtaacatcatgctgtaagaaggggatcccttgaattgtaaatggcactctgataagatgaggtatggggattgtattggtttcctgttgctgctgtcataaattaccacaaacttagtggcttcaaacaacacagatgcattatcttacagttctggaggtcacaagtctgaaagttagggcatcagcaggactgcattccttactgcggagttctagagaaaaatccattttcctgcctccttcagcctccagagacacgccacattctttggctagtggtctgcttccatctccaaggccagtgggggcttatcaagtctttctcacatcacatgactctgtttcttctgcctccctcttctacatttaagggacccttgtgattacacaggggcccacctagaaaagccaaaataatctccttattttaaaatcagctaatcagtggctttaatcccatctgcgatcttaattcctgtcgccatgtaacacaaggtattcccaggttctgtgggttaggacgtgggtgtctttcctaccacagggcagtttctagtgttgcctcttctccctgcagttcgctcatggagtcccggacctggcgctgaaggacatcgcctgcagcgaggccctcctggagcgcttcatcatcttcagccagagacgcggggcaaagacggtgcgctatgccctgtgctccctctcccagggcaccctacagtggatagaagacactctgtatgccaacgtggacttcttcaagctcttccgtgtggtaagggaggggtttggctgctcgccaattgcaaggtgattcctggggtagcagagcctcacgaattgaccttggggagggcgtgagcctggtgttctggacaatccttgcaaaagctccaggctcccagggctcaaaaaatcacaactgatagtatttctagaacagtggcccagggacccagaagtcactatgaggttcaccattaggtatgtggctgtggcatgtttgtgtccactctaaatgtggggataatcccctttacctcctctaacagagtggtaaaggaaggaggaggcctggtttgactccctgacctgctatttcctagccaggtgatcatggtaagatattgaaccttttctggtcccagtactcatctataaaacaaatataatactttacagagtggtaggaattatacaagaaaagtatacgcaaaacatttcataaattttaataaatgatggccccatgcttcttcctctggaaatggtctcaacctcaatggttggtgtttctagagagaaaaaacgacagagaaagtttcatagtctcaaaaatttggaaagccctgatctagctcaaccctttgttctagaactgcatcccagacagactgcttgggacctgaaaatatctcctcctttgctagaaggataagatgagaaggaattagataaaggaggtgtagagcagaggttttcacactgcaaagtgcataaaaaccatcagagggccgggcgcagtggctcacgcctgtaatcccagcactttgggaggccgaggcgggcggatcatgaggtcaggagatagagaccatcctggctaacacggtgaaaccccgtctctactaaaaaacacacacacacaaaaattagccaggtgtggtggcgggcgcctgtaatcccagctactgaggaggctgaggccggagaatggcgtgaacccgggaggcggagcttgcagtgagccgagattgcgccactgcactccagcctgggtgacagagcaagactccgtctcaataaaaacaaacaaacaaacaaaccaaaaaaacccatcagagaagttggtaaaagatgcaagtgctaaatccccacccccaatcactgtgattcagaagaaccaggccaggcccagaatctatcctgttaccttaggcgattctgatgaagaccattgtaggccacactttcagaaacactcaaaattagaatccttcagagaaggtggcatatataatatttctagcatggaattatgttttttttcttttgcctacattttaatttctagaactgtgttgtagggaatgtcagtcactaagaacttgattgaggaactgtgttttgtctgtttcatgactgctctctcaagtcccaggaaactcactttcagcttgtcttaaaaagcaagctgaaggcttttaaaaatgaagcaacatgaaataagacaccgcagtttctggcacggtccacgcttaatccccttcaatgtgtgactttccgtggaaagttactctacgattttcccagctcgtcagggtggggccccagagtgagtatgaagggtcagagcctagggatgccaccatcagtgagagcccaggaccccagaaaaggtctcttggctcaccacactgtaggaaaaataaaaagcaatgtagtccaaatgtctctatccaaagtttcaaaaagaacttgattttagacacgctccttgacttgttttcagaatcagacagaagagtgaggcaacaaaggtcccttattccaggcagctgaataccagcacagccaggagtccagtgctggtgtttgcagagccaccagaggctccctctcaggtgtccagggcccgcatgctttgtagaatgggcagaatgagcaatgtctgtgcacctgggctttgcaggcagggcctgggtacccaggttcgtgcaatcctctcgtcaccatgaagggagcagcatcattcttcccttcttgaagcaccttggccaccagtataggtaaatttacctcccaggacatgaccattgattctgggatgtcaatgccagagatagtagggtaaatcggcacctgggtaaaactttccattggagactagaaccaaaactcaggacactggcttccaaatgtttctttatcagacaagaaagaccaagtctttccttacgtcttcacatgctgccttggcaaatgctagcattcacaaaccctgggctaccttgacctgtcacccttgcagacctcagacgggtcctgggggcttgctttctcggtttctgtatgcaggcactcaaacctgcatcaggcacctgtgaagggccgggcactgtgctgaggccaaggctccaaatgtgaaccttccaccctcactgaactcacagccagaccagagacaagcaaacaggacatttcacagcagtgcagcctagaaagggccaacaccagcagcatttgtccccccgagcggtagcttttagaagcttccccagtgattcaatgtgtcctacaaatgcctggcccccactcccagagattctgagtcagctggcctagggtgcagccttgacttcactgtgttaaaaagcttcccagataagtccaatgtccggccaagattgagaatcactgacctagagtttaatttaccacctcagtctctatagaccacgcataataatagtaccccacacacctctgagggtccaaagaactttcatttgatcacccatgagaccaccgtggtgtggagatgctttctctctcctgttctcttaacaaagctggtgagcgacagagcctgcagtggaccgggagatggcccagaggagaaagctctgccgtagtcggcctcagttaaccacggagcaccacccctacctgctctcctctcactcctgcttccgtctcggtggagaaagatccaaccgaagcaggacacatctagtcttctggtgcctttaaaatgtacttttccatttgacaaatggattacactaaaaacaaaaatttacaaaaaaaaaaaaaaaacctgaaagaaattgcaggcattaaaatgggactttgcctttattgctcctgggcccatcctatttgggtttttagaaaaacaagcctgaggcaggcccagaaaggctcagggcagaccctccgatcctctgaaaggagcatcaggcaggcaggggttgctccggggccagggaaggggccccgctgggacgcggctgttattgcagctggttggcgcgcagccatgcttagctgcagtgcgggaatgctgggccttctgttctgggctgtttctcatacgcacgtaggccagtgtataaataaggttttattaaatgccaaatgagttctcattaacaaagaaagagggaaaatctcagtaaaccaccgtgacggcatctacccactttgagtcaggagctgggggtgtgagtgcaacctccgagacaagggaacctgtggagcccagagaatcggaggggggcgctggggttagcaccgactgagaccagctgtgttttctctcggttccttggagatcagaagtgagtgttgtcatcttcaaacaatccaaaggcagtacccatggccttactacatccctcccacaccatcccacccatccccgcgcgtacactcacacgctcatttgcacactatcgcacacgctcacttgcgtgcgcacacacagattggtgacctaggtggactgggagagaaataagagccaaatgactggattttctccaaggaaatttattaatagcccctcttggtttcacctgaaggagcttgtcttcacctgcggcctttgcaggcttaacgcccccagcttgaaacccagaagctcagacttgggcccaaggtattattagtgccaacactacctgaaatgtttcgcacctcataaaaatggtgtgtcagtttcgggtgagaggttgggacgcttcccatctgatttggcccaaggcatgcatgcccctccttctccttcccctcctcctccccctcttccccctaccatccttcctgttttctctccaactctggtgcacagctttgaaatcttgctgagaagcaaatctgtcccttctgctttgaatgtttatttgtggaagttcggcaggggaaccgaggcgggtgccaagacctgccatgctgctgggaagtctgagtctccctcccttccccctcctaaatgcttgttgatagagaaaagtcagcctcctcggcatttgggctcacggttttcctttgaaaatgcttccagtgtggcatgattcagctttcttttctgtcccccaaccactgctctgttgtcatttttacttttctgattgcattttatccgtgtctctttgactacggggtggctggacgttgagttccaggaagaaaagggcccaatcttggggttctgactacatgcgcccatcaatgtcctgtttcattcttggctctggctccctgaattcctgagtcactggggagaagcgtgggtggaccgccccctacccagtgagagttgccacagttgctgctctcctgggtcattggttgcagattgttaaacttcacctatgcatttcaactttcgggtggatattgctacgtcaagtgtctgggaaagcccccacagctacaggattttacagtgaggtcccactaatgacttgatgtcatgacttcctcattctttccaatttctcccacttctccataagggttttgggaaggggagaagagaaaggagtgattcctgagtgccagtaccagggaacagcagggctgttgggaggaaacaaaactaaatcaggaaggtttttgttgttgtttttggggggttttatgaaaatattcaagccacagcaaatatatttgatttatagcattagtattttttctgcctgcatctacaaaaatctttacctattaccatcaaaatatcctctgggtgaatggatttcaacaaagaagaaataaaaatgaaatagaagagaggccccttcgtgcacattgagcctactggctggattgtcacttgcctgccttgatgtcttttcagctccaggcaggcagtaggccagggcttattttcatgacagatcagatgttcttttatggatttacaaagaaagaaatactgagaagtcaaaactgaagtcacttaagacaagagcaggcccctgggaaggctgccattgaggataatgagtcctggggtcctggcctttgttcagtaaatacgcactaggcgcctacaatgtgtgcaccaatgtgtgaggcgtcaggttctctccagggtcagttggttttaagaaaggttttggcttctgatatgttttatctctacagaacagtagctcttaacctttcttatgggttaggattaccttcgagaatctgactacagctctagacctgttccctaaagaaaactaagttcacagggacacacaggatggggctcatggagcagctgaagccagaccccaggttaatagcctttacattaaaatgtttttctacctaccactaatatgcattctttagtaagcggtctcaatatacaccgattcttccttaactctgtttatgaagtattcagcatcctccctgcccccttcagcatcctccctgcccctgagcacaggatccaatggcgtgaggaccacaggcctgggcagctgctggggcatacaggcatctcttagtggctgagagactgggccctggctctatgttggctcctaacttgctgccatttaaaggaaatcttagcctcccatccgtaaaatcgagaaaataagacttgtcctacacagctcatgaaatagtaatgaaattcacattagagaagagatggaaaaacactttgaacaaaaagcattttgctcttataaaagcacagcctcttttgagaggccctttgctccccatttctccttcttcagacccccccagactaggagaaggtctgtctcatggagtgaccttttggctgcctctagattccaagctcagttttgctttcattaaccacagatactgggacggacagaaaaagacctagtttctgttgagccaaagagtctcataacttgtctgttcacatacccaagagcccaccctctagttgagacactcagttccctctcattctgggagactgcatgtctctgtgacctcctggtagagaccgtttgacatgtcccccaaccccccagtgattgagtctgaattctccactgatgacgcatttcctagcactcagggtgtcccctcctggttgccccctcaccactgaagcccgcttcctcccttttcatttgatgcttaacaactgtcagtttgcaagaaacatgcttcaaatccacattctcccagttgcctagcaacaacttccctcccggataaatgtgggtttcctgtagctcagcccaggactgaacacagcagcacacacttctgtccactgcttcaactgcttttcacctctggtctgcatgccttcaagactgcagctcatccctcccttcagaaccttccatagcctgcagaggccatgtctgccccaaaaagacacattgaacctgaggctacttatttacccttgtgttaggtatatcctcaacttagaaattaatactgtttccagattgtcttctttgaatcacagaaagtaaaacaacaaaacattcaatgcttaagacatttcatgtgcggttgggtgacatctgtttgatgaacacatttgatccaaagcatcagaaatactatgccaacaagactttttaggaggtgataaacatgtctgttctaccttaagaaaaaaatattacacagtcccaagggagagacatggttttgatcccagacaacccaagcagagacctcttagggccggaatcatcttggctgctgcctaggaccttatatcaatttcttaagcacaggatcaaggcctaaaggccccttagactgacctcagttagtagaggcagatcccttcacagccttatcttccttagaggtctagtctgaccttgaacttcggctggcagtgctgtcagttgtgatgtgtgacatggaagagttatttgttacttggaaaattaagagaacttatttggcataggaaattgtgtgtgtgtgtgtgtgtgtgtgtgtgtgtgtgtgtgtgtgtgtgtgagatgatgtttgccattttgatctgtgacttttttttccagaaatagtttctcagttccattccaactaaacttacagtctcttccggttctttgacagaaacaattcatgtgaatttgaacagataatagggaagggggaaccaaaagaagaggagagccctgggaaagttattttataatttatggcaacctcagtcaggcaactgtgaacaggtacatatggagggctccctcgggactaggcagtattcagagatgtaaggtgtgaggaccggaccctcatcatttaccattcccactaaaaagagctgggaaggaaattgtagctgtagcaccaggcacgtaactggagcttagtaactatttggtgaaggaatattattaaattattaacaagatggaaaaaagggtattaaccacacaaaaatacatctcaagctattgtttctctgttccctttcccccaaattcctagtcttgctcttatctggctgtctctctagtcactctttcttgctgactctcttcacgttcctttctccacctggaattcctgggccctccccttttactgacagacactgtcctcactctcacagtcatcagtttgtctctttacaaacctcagctcaagtgtcacttccccgtccccaggtgaaactgactgctccctccctgtaagtcaccatgatgactgctatatatagccctcatggaacctaaaacctcaacagacacagtctctttcctactctgttatagtttatttactcattaattaccacaacacgtattattgagcacctactgtgtaccatgcccagaagataaaagacaaacaaaataaaacctattcctatgcttaatgagtttacagtctagtggagagatagatacattaaaaaataacagcaaaccaaaataaaagtggtaaataaatgcactgagaaagacaggaatagctaggaggggcacctaatccctagggaaggaaagctggaagagcatggtgatgggggaagaaggctttctggagaaggtgaggtagtttgaaatgagttgactctggccagtaggggtagagtgagaatggggtgagacagggtgggttggtcattttgatccattagtcctcaaagtgataggactagtggctaaggactgcaggctttacagaagcctacaaaactatttgagatttgaagtttttttttttttttaattggctccaaaagaaaatgaaaaaactttagaattataatgaatgaatattaaatgaatatttaaggaaggtaattttattcaacttcattgttaaatttagttaaaacaagcccttgagtttcattcaacactgttttatcataccgttgatgagagaaaacaaaactgattcctggccagggccactgtcagcgtggggtttgcacatctttcccatgtctgcttgggttagctccaggtactcctgtttcccccacatccccaagatgtgcccattagtggaaacggtgtgtctgcatgattccaacgtgagtgagtgtgggtgtgggagtgagtgcccctgccatgggagggcatcctgtccaggttagattcctaccttgtgccctgagctgctgggatggaatccagccacccatgactctgaactgaaataattgggtgaataattatcttactttttaattaatctttgaaaatgtatgtatagttcacatgtatttcaatatttaatattagaagtattttagtctttattttgaagtttggtgatttattgtaaccagaaacaagctatagaaacttaattttgggccaagtgcagtggctcacacctataatcccagcattttgggaggccgaggcagacgcatcacttgaggtccggagttcaagatcagcctggccaacatggtaaaaccctgtctctactaaaaaatacaaaaattagccagatgtggtgggcacctgtagtcccagctacttgggtggctgaagcaggagaatcacttgaacccgggaggcggagcagtgagcagagatcgtgccactgcactcccacctaggcgacagtgtgacactccatctcaaaaaaaaaaaaaaatagaaaagaaagaaacttaattctggtttatatcaattagcctgtggtaaaattggtttcattatagccatttcacttagttgaagtttccaataacctgtggatgaattaagtgaggatttactatattcataaaatcttaaattccaaagcctgtttgcagttcaggtttttccactttacaaacacttctaagtattcacaatgattgcttaaaattcataccagataaatcattaaataagttgttcaaagtcaaataatttcataagtaaaaattaggagcttttagaaaactatacctacatagacctagacctatagatagacagagatctgaatagatatggacacagatgctttccaaagtgttcatgtgatgtgtggtggagtttcaagaccagagtgtgcctggggcctgcagaagtaaaggagaggggatggagagaagattgtccacatggccatgggcaatctcccacccacactcaagtgaggaagacaggaaacaaattcagaaagaagagaaaataatcaaaactgatgggagcttgtgactgatttacttatgcgcagcctccctggagacatgagtgtggctgttccttaggttgtgcctctgggctcctaccccctcttagatgccttcctattatctaggacctggttgctttttgtctgcatagcttctttggattccagtctttgatgccagcttcctcctaaagtagcctttcagatgtcccttggttaccctctgctatctaagggctcatcctaccccacactcattcccagcaccaatttctggatctccaggctggagatttagacaatgggatgggaagaacccatgatgggtcccagacagaaagtggtgccagccacagaaagggcacacaggcacagaagttggtttggggtaagacgatgtggtcagttcagaacacgctggatctaggcagatgcccagcagacagttggatatgtaagtctgaagctctggggagaggtctaggttggaggtacagatttagaagtcatcaacaaaaaggtagcagattaaatgataaaggaaatgagactatccggggagtgtgcagagtgagaggagcaagggaggcccttgggaacctcagcacttcaggggaaggtagaggtacagttgctggtgggaaaggcagagaagtagcaaagcaaaccaggcaaaagcagtgtcacagacgaccagggaggaaaaggacatgatcaaaatgttgagaaaagcagagaggtttgaaaatacaagaagcaaaaatgtccactagacttaaaaaccaggagaaaactggggggttcttgataaagcatcttagtaggatggtgagggtagaagccagggaagtgttggtgaggaagtgaagtcactgattacggactatgcttaaaagaatgtgggaatgaagggtggaagagagaaattagactgtagctagggagacataagcgatcagaggtagattctttctctcctgtgggagaatcttgcacgtatacacagcatgacgacagtgatggaagggctggcgaagcctcagggagactcttggaggtaaaccccatgaagggaggactttgtttcattcactgccgtgtccccagcacctggcacaatagcagacactcaatacatatttgtcaaatgtgggattttatcatttagaaactgcacctggctgtgagtaacaaaagtcagagaaaccgtgggtttcatttttctccccaggcagagtctggagctgggtcctccaagaggggtttggagcaccacaggtttcctcaagacccccaggctgccctgtgtttccctccttcatccccagcatatgcctgtcatctggtgacctccaaacacctgtgctgcctcctccagcacatccatgttgcaggcagggaccaggcaaagggcagaggggcctacttcaaaagaccatttccagaaaccccatcctatgacttctcctggtgtcttggttaccattgtgccataggctcaccctgtatgcatgggaggctgggccaggcattatgacttttagcaatattgcatagataagcatcaatctttgtcactgtgacgaagcctagtcactcagtgctaggcaaggttaatggaatgggttggtgtgtgcattattcttgaggtctttcttatgcttcatgttatacatttattaggacgtttaggcaacagggggataaaaatgaagaggagatgcatgctatgatctgaatgtttgcatcctccccaaaattcatatgttgaaatcttcatccccaagatgatggcattaggaggtggggcctttcggaggcaattaggtcatgactgggattagtgcccttgtaaaaccccagaaagccagcttgccgcttccaccatatgaagacacagagagaagatgccatctacgaatcaggaaatgagcccgcaccatgcaataaacctgctggagccttgatcttagacttcccagctgccagatctgtgggaaatagatttctgttgtttacccagcttatggtattttgttgtagcagccagagtgaactaagacagtgctgatctcgtattcttggagggaacccttagtctttagggaaagcaaagccaccatttggggcagggtgttctccaagtgctgccacatatgctgatgtggttaaactgcaaactatggtaaaaatgtggaggtctgtggaattgtcaatcaggaaaaagatataaaaagaagttaaagtcttcgtgcttctggaaggatatgtgccaaattgttaacattgattatccttgggtagagatgtggggaagtttgcagagacagttttgccttgtactttatataagtaaacagctactacttcgttgtcttaaaaaaaaaaaacagcctatgtgctcttcatgtgactcagaactacctaggcaatacgattaattgaattagtaaaattgagtgattatgaattttcaggaagtcattaatttaccacttctttattacatccacttctaacaggacttcaatataggggaatttgacttcaagataaaaagaccaaatttatttacccttttaaaaaaagacaacttaaaagcagacttgtcttacagaaccttccttagttggacatcgatgagtgtacagaaaatgcaatggataaaaagcttggtgatacaaagataaaaagtggggtcctgtccttaatgaacataccatttcatggagtatcaggtgtataaacaattataatcaatctgcttgttattctgataagatcatttactcacacatcaaatactgagtgcccaccacatgcccagcatacctagaagtcatccagtatgatttctgtctacatggagcatagagtcttacaggggagatagatgacaagtaaacaccagaataattaccaatggtgaagagcacaaggaaggaaacagaactcctaaagagagcgtggctgggcaggggtgagcaagaggcatagaaaaaggggcatctaaatctacttgggaggaagctgtttctcacataggtcatcatgttaggaatgagacttgagggatgagtagaagtttgccaggcaaagaaggaatgggggggaatagagagcagagctaggggcaggagacagctgacgtgtgagcagacataaaaagaagtccactgtggcagcagagaagcaggagagaaggcaagtgagggagccaggcaccagctcacagaggtcatgtgtgtcaaaacgtagtaatggccttctcttctggagacagtagggagccatggaagatgtttgagcagggaaagcgacatgactggattggcctgttgggtaactcagaccacaatgcattggaagggagggggctagaggcaaggggactggcaagaaggccagtcctttttctatgcctattttgatgaaatattctagaagggaagtgaacaaaggtagtcctagagaggaagaacaaaacagataggatacttccttagtatttgctcattcgacaatttatttttgcatatacactaaaaccttttttattattaaaacgttttattgtaggaaaaaagtatgaaagtagagtgaataataaaatgagctcccatggatctatcacccagcttcaactattatcaatatttggctgttcttgttttaactgttctccacctttttttcctgaagtttttttgaagcaaatcacagacaacatatcatttcaccatatgtacttccctctgtatctctaacatgtaagaacttgttttaacaaaatcaccatgctatgatcatacccaacaaaatttatcataatgtcttaataatacctaatacccatttcatgtccactttcccccaattgctacagctggtttgttcagatcagaatcaaaatccacctgtggccattttactgctatgtctctcaggtctcttttcatctctaataatctcaggggagacaggagggaggacgggcaggacttggggctaacttgcttatcgacacacagttttgcctacttgcttcctcccttcacacccactcttcttctcagccccacccttgtatggaaaaaacagaaattaaagtgctttgcccagcacccactgaagctatttcgaaggagtttgaagagtactcccggcaagacaaatgcctcggtccagtgctcaggtcaaagaggggagacgcttctcagtgatgtggtgtcaatagcagcttagttgttctttcctctggaaaattctacccatctgctttgtaactcccatacctaacaaggccttttatttcacaattagaaaataagcctgaaatatgaatgctgcctgagtgtacctacatttattctagagtttcagggtcaaaaagaatacaaggacctctgcatctacagccaagaggagaggggcaaagacacacagctacaaatgagaacctggctggtcaaagcctaactccacctgtttgtcagcactgatgcaagttaggtcagcccaatgatcatttaggagaactgtgctggcaaataaaaagcagaggcttttggtccccagatacttggatgagaattacaagtccagctggttaaaaggcacatgcccagtgctcacttcacacctactcaggaagcacacttgagttggaaaaccactgtctttacacttagaactcagtcctacatgactcctctaggatcagtgattccatcagttttgaaacatgaagcatgaagtcaaacaggacatgaccttggtttccagaaaaccagatgttcacatcagtctctggagcttggaggcagcacacctggggacttccacatcccctgccgaggtggcaaaagcaggagcagtggtgagttcacatgggctggggtttcctgaacactgctggcaattggagaatctgcaagggaacttctccgactcctaccagcagctgctttaaaataaaggtgatgtagctggtcaaatcctccatgagagagcagtgttgaatggaggaagagacacaacctgtctgaaaatggcacaaaggaagaaagatgtaaacaatgacgagaagactgcagtgtctacaaagctccgaggtgaacagatgggcaccccaggcccgcagcacttccttcagtctctgccagctgcactctgttttccttcctccaggaatcttgtttggtgtcactaaaacagcaattagaatcactttgaaatagtgatagtatttaatataactatgaaactatctgtgattgacaagtgcagcaaggagtcttggaatgagagcctttattttttcaattaaataaaagagttttttgtttctaaaagtaatcttgcagaaaagatcctgcgatcagaaagaaggagggggggagttttcaaacatataggagatcagactgtgcctatgtgtgtatatacctacaaacatatatatatttaaaaaattgttttactgtcaattacagcttcccacactcctagacagccgttctcaaggtatcaatctgagatcttggggaggaatattatctgatatgtcaccaagaattcaagaggtgagtagcctgatggtagtaattataatttcattatgtctttccaccatttaccccacttatgtcaaataatttaattgtatttcaaacctgttcaaggaaaagtacatttgatctttccatctagcaatttcaaagcacctgttcacatcccaaattatctgtgctcttaagtaagaggcagaaagaaaggaaccacccttctgatttcacatcaaaaaagaaatgccactggcaataagcaacttgcctggtgtggcataaatcatcagaagacttacagttgaatctaagtcttttcagtactgaggtggttcattattctgttacagtcttaaaattcacataaatatatactgccaataataatagcatacacctttatagcttacaggcactcttcttctaagtgttttacctatgttggcttatttcatcataaagaaaacaatggacttttgtgttgttttgtaaaaagatgcgcacattttaattaacatctgattgcacaagtctcctcccatatagaaatggattcttccacgcaatagataagaggtgctggggatatgatgatgaacacacagatttggtcatgaccctgtgggaaagagagatgggaaaaaaacaattctcttcaagtgtgatgagtgttacgaaagggagggaaaagttgaaacaggtttttttccaaacttttctccctccattattcgcagctgacttgggctccaccaacctggaaaactgcatggttggaatctgtctttataaaacgcatctcaacctgggccgagtatgcacactgatgtgggaaagttagagaagagcccattgtactaatgctcacctgctacagtgggagtctctgttaaacagtcttttcttcatagcattaaaaaaatttatatcactacaataaggttgaaattgatagagaatgtacaaacaatccccaaagtatatcaacactcttagttctgagtagaagttccagaaggcttcttgactgtctagatagcaagtctaatcatttgtgaactaagttaaagcagaaggcccagtttatatgaattggtattacaccatttgacctgagaacagccccttcatctctgagtgctttgactaaatgagcaacataataatagtaataaccccttacaagatgtcataagactcactgttgttgaagcaatttgagattttgactttattgaagcatagatggtgattataggcatgactcactgtgtggattctccctgggctcatcagtttcagagggcaagtgttggcatgtggacaaagagagggatgacacgtaaacatggcttattgcaatggggaaatattttcagtctcactgattgaatcctaatggttttataaattccccagtaccactgaaagcaaagcaagtaatcaggtgtgttttaggaataaaagcagcattattttaatttcgtattttcccctaaagcaaagccaaatggcattatgggagccaagctactggcagctccaccagccttctcctgagttctcggcattacagatctaccctcaaaggatgaggccagcaagcaccacagggtgcccacatggagaagagaaggccaccaacctcctcttagctggcacagaattgaaaaagtgtttttccaggaatggatacttcatctgttctgtatttgctagaattttaaaacgcacacacagacacacacaggcgtgcacacacacacgcacacacacacgagaaaaccacaaaccacacatttcaaggaaatggaagaattcattggtaaaattaagctaataagattattttccaaatataagaaactaaattttagactatttagccaaagaaatttgctctgatcttgcttttctacaacagaatcattccccaatcattttatttccctctttttctccccagtatccccatcttggtgggacaacagaacccaagaactggcttaacagtaaaatattttctgcatttgcccaaggacacattcccaacgaattcaaataaaggagactagaagaagagaggctatactacagtgctctaggggtcactctgtgatttgttgttgttgttgttgttgttttgagacggagtattgctcagtcgcccaggctggagtgcagtggcacgatgtctactcactgtaagctctgccccccaggttcacgccattctcctgcctcagcctcccgaatagctgggagtacaggggcccgccaccatgtccggctaatttttttgtatttttaatagagacggggtttcaccatgttcgccaggatggtctcgatctcctgacctcgtgatccgcccgcctcggcctcccaaagtgctaggattacaggcatgagccactgcgcccggccactctgtgattttctttaaggctcatcctagtattctcctagtccctaagtagatggcagtaggttttgttttttgtttttcgcagctggattaaggattgctgagaatatatggatgttttcttttaaatgtggaagtcaaaccaaacgttggagcattggcctcacagcagattatgactctagctgccttaaaataacctgaagactttgccttgccctagtttatccatcggccgagtatgcaggacttgctgtgggtgaccaggcccctcatgcagaatggtggtccagagacctttacaaagctgatgggcatcctgtctgacctcctgtgtggctaccccgagggaggtggctctcgggtgctctccttcaactggtatgaagacaataactataaggcctttctggggattgactccacaaggaaggatcctatctattcttatgacagaagaacaagtaagttttctgagtcctgcttataaattggcctctcatgttggttaagttgatggtttaacacttctaggtgaaaccaaacctggggttgcatctgtcttgtcttgctgagtggccttaggtaaagagacttctcccagaaagtccacttccccttgcagaaagggggcattgcttataagcaattctggacatgaaccacagaaagaactgaggcccacttggaaagggaacagaggggccatttcccactgatgtaattgaactagggctaagttcaagaggaagagaatgatccgcaaggaagcaacccagagttccaggtgaagctcaggtcagaagggccctggcaagtaaacacggctgtgggatgcttttacaaacacaatatcgtgaaaatctatgtgtgtagtactgaattacattccaaatggcaaattcctggcaaatcatcttccccacctttcactatttttttttttttggtcttctatggggtaaaggaggatggggtggggaagaaatgtaactggctgcccctctagttaaaaactgaaaagaggcagcaagggacatgccaaaagtagttggactctaagatagctacacacaacaaagcagctaagcagctaattgaagggaaattactgaggctcaagctgagattccaagcgggggccttgtttggcctctcagtccctttcatctgagaaaggcctcagttcctagcagtaatcagaggcaggcttctcagcctccttctcctaaagcagaataaaccacagggcaagtcgcatcctttgtttctctgatgaggccattactgagagtcactgtggcattttgctactaatgatgagcttgttattggtggggtacagcctattaatttaggttattcatcaaatcctccagcatggagttgaatgagacatgtgatgtggatacactaatgactatattgagttacaagcaatggggagtttctgtaaaatctgtcccttgtctcctggcagcatccttttgtaatgcattgatccagagcctggagtcaaatcctttaaccaaaatcgcttggagggcggcaaagcctttgctgatgggaaaaatcctgtacactcctgattcacctgcagcacgaaggatactgaagaatgtaagatcccagctgggcttgccttgtgtaccctggacctcccagaagtgtgtgtgtgtgtgtgtgtgtgtgagagagatgtgccttcctggtagcacatctcatgtttgttttttgctaagtggactcttgcgtttcctcccccatccacagtcatcactggaatgctttgcttcagtgcccctgcctgggccctcccctctctactgcagcctacaatgaggttttctttcccattgcttgaattatatccctaatggaagggttcacaattctctgaatcctggctactcagataaagacagggaggaagggaggaagggtattttctcccagggggtccaaatctagctttaacgagggaggttctgagaaaataatatcatcaatattacatggacttctgagatactaagaaattagattctgtcagcccaggaagttgggagatggtgaattgttctgggaaatagcaatagactgagaaaataaaaacacttccttgaaaagcctttccctaacactaagtgataggggcagaaaagacacaaccaaaagttctctctcacttttctctctgttcgtgtctctgtcttgatctctgtctggttttaggccaactcaacttttgaagaactggaacacgttaggaagttggtcaaagcctgggaagaagtagggccccagatctggtacttctttgacaacagcacacagatgaacatgatcagagtaaggggggttggaggatggggaggggaggggaggaggaagcggtgggggcaagaaagttccacttgtttccttttcccaggaaagagttaatcgctattggagttagatcaaaatacaacaagcaggccccaaaggccttcattccaagcagtcaccaagtggggtcactgactttggatgagaaatatgtttcttgaattctgggagaagtctaaaagctgccacaagaccagtggcttcctggagtttcctacttttatgaattcactcaagggcctcaaattcaaagaggcatctccccaaggggccagctctgtaactccaaagatggtggaatgtgtttgtctggtctcattttcagctttgcaaaatgaagacaagagttctatatatcagggacactcaaaagaaaacaaaaatatccataagcaaaagaaagctttttatacaccatattcaatgacccccatctggcccctcctttgcccctacacatcttccctctattctagagacccatggacttggggaaatgggatatagataggtatgtttcatagtggaacaagctcaccagctcttcagggagccttagcatctctatcctcaatcactaaaaattagaaatggctgaagaacaagaccaaagatcctatggaatttctaagcagagcagtgactgtatttcttcttcccaaggataccctggggaacccaacagtaaaagactttttgaataggcagcttggtgaagaaggtattactgctgaagccatcctaaacttcctctacaagggccctcgggaaagccaggctgacgacatggccaacttcgactggagggacatatttaacatcactgatcgcaccctccgcctggtcaatcaatacctggaggtaaggggctgcaagccccacagtgggccccttgaagatagccccatgagtggggccagagctcccttagcaagtcaagtggtcttgaatttaagctttcattttccccactgaagaaacaagaatccctacatcccctgtacagttctcattctctaacagcttatccatacttaaaacttatctatgctgaaaacggtttcctcttcacatctcctacttctcatgctgggcacctcctcctgtagccccctttaagcatctgtgtctgtcctcaaccctcttctgtctgacattgcttgagtggccatctatggccagtgtcccctcaaccccacagtccattgcttgctggacactcctgccctcaagttctacaagcacatcagcctcaacatgtcccctccaaaaactgtatgttctccttgcccatagaacatatccttctcctatatttcctatcctaattaacgtcctcagcatttgcccgaattctcaagtgagggatttcagggtcatccctaattttccttcttcaccctccacacagtagctgtcacttactgagtgttactttatgccaagtactgtgccaactgcttttacacacatatgcttcatttaattctcacagctccatgaggcttgcaccattatcattgccaatttgcagatgagaagccagggcttaaagaggttaaataagatcccacgcatgaccattaagaggagcgaacaggatccagctctgggggtgcctgagttcagagcctgcctttctgatttctcttaccaagctttgtctcctctccctcctaaatatctctcaactctgcctcttgcattccaggctctctgaggactagaggccttgtcatctctgcgccagcccattccaagggcttccttcctggaatccagggtccagcctctgttggcccaggcatttctctacactggcaccagagttacattccgcacacctgcttacgttgctctctcacttaaaatcttaatgactcgacccccaaataacacaggtcccttccaaatctgtcctaccccaccttcccagcccttgctcaactctgctacctggccctttcacgcctacaggcattcccattccatgacctcttgggattctaccctttgcaaatgctgttttcattgcccatttattagagcgcttttggtcacaagctttttgcttaaccaaaaagaaagcatttattggtggacataaataatgaagttcaggaggatccaagagttggaagccaccatgagacccctgtgtccttccacctcacttttctactcgcctctgctcagcttcatctctggccaggccctctcctctgctgatgccctagctgcttacagcccttagcagtcatctatacaccaaaaatccctttcccatagcagaagcaatgctcctagagagtttccctgttggtctggctcctgtacccacccctgtgtactctgattgggaggcctgggtcagctgcccaccatggggccatttctatgagcaggattactgtgaagtggaggaagatgtttccccaaaagaagaaacacaaggtagaaaagtgtatgtccaccaatgcctgaaatgactgtccctttcctcatctgctgagcttctactcattcattctttgagactcagcactcagctcttaaatgtcacttctgctttgatggaggtttagtcattcactcctctgtgcttcctggccctctcttcacacctctctcagacccctctcccagatagattagagttggctgttgacatgtccatctctggctgggcagctaaactggagttatttagaatcagggagcacatgtcagtcattttcaaattctcaacctcatactcccagtaaatgactccatctaagggtggaccactcttgcccatgggccaggtctgggtctgtgtcatctagaactgttggaaggtaggggcttctgtgagcagtaggagagggaataaactcgagggccctcgggagcatgccctcttgtctcagacttgtgagtcctgaggataacaaactagtgaagaaaagcctcgttctatctgtcacctggtgctcttgaggactttctgttgccctggtgccaccacaattttccagagtgtgtgaccctcgctctccaaactctggaagtggcagccgaggctccccagtggcctttcagaaggtgccagtcatgacagcagcaccaaactgcaggcaactactaagcgatcaccaacttgtctgaagataagaatgaccttgaatgcattttataaaacaggattttttttttaatttttagattttctttctttattttaccttaagttctgggatacaagtgcagaatgtgtaggtttgttacataggtatatgtgtgccatggtggtttgctgcacttgtcaacccatcatctaggttttaagccccacatgcattagctatttgtcctaatgctctccctcgcctcgcccctaccccaccccaacaggctccggtgtgtgatgttcccctccctgtgtccatgtgttctcattgttcagcttccacttacaagtgagaacatgtggtgtttagttttctgttcctgtgttagtttgctgaggatgatggcttccagcttcttccatgtccctgcaaaggacatgatctcattcctttttatggctgcatagtattctatggtgtatatgtaccatattttccttatccagcctatcactgatgggcatttggattggttccatgtctttgcaattgtaaacatacatgtgcatgtatttttatagtagaatgatttatattcctttggttatatacccagtaatgggattgcctggtcaaattgtatttctggttctagatccttgaggaatcacactatcttccacaatggttgaactaatttacattcccaccaacagtgtaaaagccttcctatttctcaacagcctcaccagcatctattgtttcttgacattttaataatcaccattctgactggcatgagatgatagatacccatttgtcagatgggtagattacaaaaattttctctcattctgcaggttgcctgttcacgctaatgatagtttcttttgctgtgcagaagctctttagcctaattagatccatttttcaattttggcttttgttgcaattgcttttggtgttttagtcatgaagtctttgcccatgcgtatgtcctgagtggtattgcctaggctttcttctagttttcatgattttagattttacatttaagtctttaatccagcttgagttaatttttgtataaggtgtaaggaagggatccagtttaagttttctacatatggctagccagttttcccaacaccatttattaaatagggaatcctttccccattgcttgtgtgtgtcaggtttggcaaagatcaggtggttgtagatgtgtggtgctatttctgaagcctctgttctgttccattggtctatgtgtctgtttacaaaacagattcttaagcatcaacccagatcgactggctcagaatttccagggaagaggcctggttatctgcatgtttacagacctattagatttgtgggacctgcagttcccttgtacagttagttactcaattaacatctccctcctctcatggtgcctctacctgctaagcccttattcccagccaggcccaccaccatccacccactgctgttataacataagcaggacctgtgcgagggggtgtggacggaggagagaggctctgttgcttcatttgtgcagcatggagttcagtggttctcacaatgtttttgcaaagtatataaagaatactccttgtctacttgacattcgtatcgtgacataaatgtcttgttttccagaaggattattttttccaagcagcttgttcctaatgcagccccaggcaccaaacagatacttaaaatatattaattgcttaaatggttaagaattcagtctctggacccacactgcctgggttcaaattcctattatctgtgcccagtttccaagtctataaaatagggatattaatagcacttacctaataggctcgttatgagaattaaatgagctaattcatgcaaagcactgacatatagtaagcacttaataaatattagctttttaacaaaatacaagccaaaaaacactgcttaggagaggaaatgatgttagtgcctcctgtaaataggcccagcctccaagctggtgctcctctaggaatcacaacgctgcaaatcacatcctccggggccgccaggacttcacgagggcctctgagcagaggggtatgatgggagcagaagcccagcagctgtgatgatgtggtttctgatcttcctgcccttggggtgggggaggaggaaagcaaggggcaatgaacagaaaggagaagatagcggggaggaaatgtgtgaggaagaaacacatcactgtggcttgtcctggatttttctgcttctgttctcgtgttttgggaagtctggaggagacttgaaaatcattcatgtccccaccctgaggatggcttagtagcagagaggccatgaaaactctttgctgatggctctgaaagcaaggatgttgcttcactgggctgctgaaggcctgcctgggggttctgagcagagagtacaggcccctcccaggagggcggcctaaccaccatgctggcatttctgtggaccatggtctgctgtctcagaccccctccacaatagggtctgcaatctcattcaccccataaatacattctgtctttcctctgatcccctcccattagcagggggaaataaatggaagtcagacggcccagttagaaggcaggcagtggagtaggaaaatagatgatggtggtttggggagcctcacatcactcatggggagacattcattcccatgggccttccaatcacccttttctccaaatctaaggacacaggacaaatgggtcctcatacaggcaaatatcttaaactggtatgtgtattcatttatagttctaatttatatgtgtctttattcacatatattttgcttctggagaaaagctcaattagaaaaattaatacattattcttcttattgcccttcagctaaaacaagcatacacacccctcccctttggattttttgtttagcaaaaggttaggcctggcacagatgaaatactattcagagttcacagtgtattttcatttcataatatatttgattttcaggtcttgaatttcacatcaggaagctgatataggaagctgaattcagccagattttaatacgaaaatacctctgatcaaggcataaaattgtactttaaccagtaaccactgtatttctctaagctgtgaaaaaacatgcattcattaactgctttttcctctgctgtcaacacagtcaatacatgtgcataactccttattgtctacatggtgattatcttgctgatgaattctcaaaggccagagatttggactattttttctctgtaaccttgcatgttcctggccacatgccaccaccacccaaacagaatgtacgcagggaatgtatttttcaggataacctaagaaaaaataggattaagaagataaagctgctgatcatgtaatgtactttagactcagatatataaatatttgtgaattatctgtcctatttctttcttctattaattcattgactctagatgtgcattggaaggctagggagaaatcaggggatcgtgagaaagagcacagaagtctgcatcacacaaacaatattatttcaagagccatgaactagatcctaagcaactcataggcaatgacctcatttcatacctctagtctctaagaaacatataactggcctgaggaaggaaaatgtgggcaaggggtagaccggggtcatgggtggaggtccaaatagtaatcaatggagctcatagggtggactgatattgaagctgctatgagccagccacatgctgggcactgttacatgtcatctcatgcaatactcccaattacctgcctagtaagcataattgtcattttatagaattaaaaacagactcaaagaggttgacagtctaatgtaacacaacagctaaatgggggatctggaattataatccagagctgcctggctctgatgagaaagctctttctgctgtcatatgcagcccacattaatagggggctcagaaagtattctctggataaattatataatgaatccaatgaaggaagacattattttataatatgcagcataataggcactattatgattggattttcctgcttgaaagtagctagattagagtaggaaaccaaaaagatgtgaattcattcagtcattcatgcatttgcatggattgagctacctacatttgaataaatgctgttaatccctgattccttggaagctcacattggagagataagcatgtcattaaataatgccataatagtggtatctcagaggactagcagaacataattcaatctgacagagtagaaacagattgtacaaatccaattcaaaacatcataaatcctctaagcactgtcaattcttcctccaaattatctctgaaattcctccttctttcccatttatggcctccatttacagaagcgtgtactgtctctcttagctgtttgccaggccgccagtctcttgctgttcagctctcaactgcttccagcaagatctttctaaaatcccaggcttgccaagacttagcgcccacagctccacagtgactcctcattgctgttaaggtaaaggccttcccagtctagcccttcatgcttcttccatgttctatgggactgccccaggcttcccacctggtaccactgagcctttccatccttcccccactcgactgccaggtcaacacccacacccacgcttcaggactcaggtcctatgtttcgggccttcttctgtgcaccattcccttccctgtagcccttgatcatgatttgtttatacgcctccgcaccttcatggccctgaacccctcaagggccgaaactgccttacttttctttttgacttcccaacttaccttagtggagctgtagtcacatagaatagacgctcataaatgcttctctgggctgtaaaggttgaattttccagctaagcaaggaagaaagacaatttcaggcaggaggaagggcataagcaaagtgcagagatgtgaagctcaagagaaatggatgggctgggcagaggtgtggctgcagcatcaggggagaagaagtagtgcctggagtcagcaggcacggcttgcaaaagcttcacctataggtgaaaggacaccatctcttgcaccaataggctctgtgattggaggcaactttgctgttttactgccagaaaactgaggatgataacccaaactgcagttcaagtggcattcactggtgtggctgaaatgggtgtttgtggccagaatgtggtctgattggtcagtgcccagctctgttgattagcagatgttttgaatatagtagcatccatgtgcccaagttgttgggatgattcaacaagaaactttaagagctcaagtgccctgcagttgtcagccaggtgattctcttcctttggacccagttagacgcaggcattacctcgtggctttgccccagtgtgaatctttgtcctccaacttgatctttttatttgtttcattattgtatttaagttgtttattttagagacagacattttttaacagctgtgcatttcctgtccctttgttttccagtcgtcatgtgtttccttactctctgtgggtgaacgtttcagatgtctgtttgcggtgcccagcgtgcaagataaaatttattgcagtgccttcggcctctaactcaccattccaaccaattcagatagcccaaggctgttttatccagtggatttttccatgtagtgggaaataaatcttgaatgttactgtttagattagccaggaaactcattctgggatgtttgcccacatccattggcatttctcaaaaggaaccccaggtgtctaccttgacaccagcagggccacttgagccctccgctggcattcatcgcccgctttgttctcagcctgagtttaggagttacagatgtgagaggcgggattatacagccaacatctctaagcgggcagtggctcccttaccctcgaagacctcactcctagcacgtcctggatgtattcgtcaaaatatgtcctcttatgccacgtcagcacagggttgctccccactttgatcatcaagtttaaacaaaaggaaagattttctttctttctctgcctctactggacatcatttcccacctaacagataatttaatgtatctgttactgaatgtgtttgaattacagacagagaggtcacagttaaagaaggaagcctgctgctactgcagcttgtcctcccaaggaggtgtttgatttagctgtgtaaacaaatgactgcattctccagaggtcctgaacacagctgcctgcgctggagagggctcaaacctcttccgccagggtgaactctgcttcctggtgagtgccagcaaaacaaccaacaaagagctgtaggacttgtgtggacttcaaatggtggtggtcctgccacttgggctcagccacagcagttaggaaactaaaggggaggaggaaagccctttccttgctttattgtcattggctgtcatagggcattacaatggttctctttgagattctgagctccggctataacatttgcccagaatctgcctctgaggccttaagacactgtgtttttattcagcaaagatgccctttgactccttttcccactagtggtgctaggtttgagcaccttacactggccccttacaatagccagttcttgtctacctacattcttccctaacattcatgattgcatagttactcttagtgtagaagcagacagcttttacacatagactccatggccgtagcctcatagaacctactatattctaacttgcaagctaatcagaccaaatatatcaaaatcaaaaacctctgctgagagtttattcattcatctctgtctcccaaacgtacttatgtacatacgtgcactaatatacatgtccattagccaagattttgatttcagggatcaaagcaagtaccaatagggaatgaggtcacttgctgcatggcaggtggcttccccatgagaatgcaaggccacctcatgactcatacttcagagggtgacccaggaacttctgattcatgtccaaagcagcttctacaattgctctaccttgatctagggaagatgtggggaggatgacattcgggattagctttataaggccttcctgtgggcagagttgtctgactttcacctagtgatcaacaagcagctagcaagcatcagtgtgtgaggccccacgccctctcagctcccctactgcccacctgggacatgggctttggcatctgtccatagcattgttctaaccaaatgaggtgttatggatcagctcaggatgggatatgttcccagacatattatttaaagaaaatagctcccttcctcccctgataaacagctgccatggctaaaaggtaacctggctggggcttaaaagtctgttgactttcaagatattttgcaaaaacagtcataaaaatggtatttatcagatcctaactatttgtgagacggtttggtataccatagtggttaaaaacacaggctctttccagaggaggtttactttgcttagtcgtgtctcctaagtgaacttggacctcataaggttgttgtgagaatgaaatgggtgaatatgagtaaagtccttggaccagttttggccgtatagtaagccttcagcaagcatctgcttttattcctacagggaggcaattgtaagcccttcacaaacagcgtctaatgtgatccttagaacaaacctatgagatagggcatatctcaattttgtaggtagggaaacagaagccacacaattaggaaatggcaacagatctgttagactcttaaacactatgctacaccaatttgcaaggcaaggaagacaaagcacctttgaaaatgggtcagatgttttagggtaaatgaacgtttgagaatcttttaagttttttttcccccagagattatcaaggtatcattgtagggggatgcatcaggaaacatgactatgaatcagctgcctgataaaccagccaggatggagcccacgtcatcacagcagtcagcaatgccactgaaaaacatcagctgcttattcccgtatagatttccccttaagacatgaaaagggagttcaaagagaatgggccagatatctctgagagtcatattactaaaatatatttatttttactagcttttttgttttaagaggtatactgtcattagcactgtagcaaaaattcacgttttattaatttctcctagtttatcatgtgattctagggtaggatgcagagttatattcaaaatacacaaatcaactcaactcagtaaacatatatcgaggccctatcatgacaaaatgctattctagagaccacggcgaacaagccacggccccagcctcaaagaatgtactatctttggaactgtgctggccaatacagtaaccagcagccacgcagggctatttaaatttaaattaattaaaagtaaaaacacaatgcctcagatgcattagccacattttaagtgttcaatagatatttgtggctcctgcctgccatattggacagggcagatatagaacaattccatcactgcagaaagttctactgaacaatgctgctctggagcagaagatcttcttgttcagggatgttacacccccgcttgtggctagagtgtggcttatcctcagagcaaggataggggaaccatggcactctgcaggctcagcactgaagacacggatgcaggctctgcttctgacctagattgaccttgggcaaggccctttgctcctctgatcccaatttcttcaccagccaagtaagaacatcagaccacaagccctctagggctctgtccaaatgccccatgactgagtgaactggtagaacattctatgtgtgtgtcacaacatgaagagcaaagactttcatctccccaaataattttgtttttcgttttaggaattaaatttcagattcactctaattgccaatactaaaattctctatatgcagttctaaacttgacaaaccaataaaaaaagattatttgactacttatctttgtacaacattgaggtctccctaaagcaaatttaaatgcatattttaaaaatgtattctagcagttcagttcagaagccccctggcccaagcatcacactgtcaatcctttgtcctcaagcagcatggttgggtgggttaagtactgacaaacactgggtgtcaggcccatggtcagggactgtgctaacagtctacatattagatgccacctacccccaccctcaacagacccaaactatttatccaatagcaaaccttgcattatttctgtccagaagaaacaaacatttattgacaacttttggtgtgtgacctgtttaagtcctacatctcatttaaggactggtcaatgttaggctaggcaatgcctgtttgtgagagaatcactgcctaaagaaaattctccatttcccttagctctatggtgggtgactacacatactggtatttcttaaagaaataccaattccatttccttttaacataattattaatatctcattagcatggtgtcactgaagcctgggcccaaagaaataccaattccatatcattttaagatcattattaatatctcatcagcgtggtgtcacttaagcctgggccctttagaatttttcatgtacctgtgttcctctgcccatatcagctggaacactaatagttttcttcctttttatctagaagactgagaacattacatgggacctgcccccagggcatggaggctgaggtgggacagtttagttcaggaggcccaagaagtgttgggtgtgcagccccttgttcaaacacagcctctgaatcgccagaggcttccggtgcatactctgaggcgcaggtgggactcgggagtgagaggtttcggcgaatgaattgggattgcctacttcttcccagtgcagtggagcttggttctgtggtcaggtccttacgccctgtctgcctttctcgtttctttatttctcgggtagtagttgtggaatcaaatgacctggggtttgatacctactctaccacgcctctgggggagtcactcagactcgttgaacctaagttccggggctgccaagtgaggataagtagtaattgctgatccacctacttgacaagatagtagtgagggccctgagcgccaggctgtggatccagcctttcccacggttcctggtgtggcaggaagaactctaggcctgaaggtgaaattggggagggagtcccagctctgccactgtctctctgggtgacctcaggcaggtctcctcaaaaaaataagatactttataaagctcagtttcctcttcagtaaaatgaggattccaggtaactcacagatagtttgtggggatgaatctgttccttaaagcctgcagtacatcaataacccagtcttcctgcttgctttcccccctctccactaccagtgatcatagtctgatcccataggtgatatcccagctcaaaaccctacattagcttctgtggctgtttaaggcctgcccagaactcccctggtcttagcactgaaagcacgtgtccggggaagccctgcattggtcgttcatactactgagtcccgcagggcaaaccgtccggtcccaccctcctttctagtgctgctgtcacactcacctcccttcaccctacactcccttctgtgccttgcaattacctagggagttttttacaagatatggatgccctggccctgccactagagattctgatttaattgcttggggtagggcctggcataggtatcttttaaagctccgcagtggttctaaagcacagccacagatgggaaccactgatctattcttgtaggtccccagatacctcatgtgctgttccctgtgcctgagctgacctttcccccactttcctctcctcggctaattcctgcttatcctcctactcaggaggctcttcctccaggcagccttccctgatccctccaggaagacttagctgcgtccctccgctgggcttccccaatacactgggcttgctttcattagaacctgatccttccacattatggttgttggtttgctccaatcctctccctcattagctctcaactttctttcaggaagagatgtttatctttccttcttgtattcctagagtcgaccaggctctggcacattgcagattctcagtatgcattcagggaacaacttaatcaagacaagaccatctgacttcttgtgagttacatgctaagaaagaaatgtcgacaccaatagccctcacaatgataggaacaggaggttaaagaaaaggaaatagatgcaaatagcaatataagtgctttaacaaatctatacaggaggacaaccatcatattcaaattttcaaacattcttagttctgctcttttgtgggtaatggtttttttttttcctcttccaggagaagaaaagaggcatattatagaaattcctcctcccccagcattacttgtcacagaattgtaattggaagtgatttccctgactaagttattttggctgtctgttattttctctcttcctccttgctcttccctcagctggccatcctgtgtgtttggagagagccagaaaggttcaaggctaggaatgtttctctctctctttaaagctctttaatcgtcaggctttctgatcttcaaagcaggctgtagccagtgtgaccccactccctcgcctccccatgctggagagtaaaagcctggagtatttttgtcattttgaagacttgcatatttggacagccttggacatctggaaagtgtggtcctcactagctctgcagggataagagcacgtcagcacttccaagctctctggcgcccctacatctggacacgttgaaaaattaacaccagactctggagttaagcaaacattaagtttataggcctccttgcatttgaccatttcctgggacagcagcccttatcctgtgactttctgtgtgtagagttgagtctttgcagttggtcctcctcacactctctcaactttgtgactctctgcagtgcttggtcctggataagtttgaaagctacaatgatgaaactcagctcacccaacgtgccctctctctactggaggaaaacatgttctgggccggagtggtattccctgacatgtatccctggaccagctctctaccaccccacgtgaagtataagatccgaatggacatagacgtggtggagaaaaccaataagattaaagacaggtgatgtttcaggaagggctcgctgcatttctccaaagtcagtgggaaattacatttggtagagagaaagggattgagactggactcataaatcaataaaattaagttaaataagaaaaaataagatattttataaagctcaacaaagagtccttgaatgaaagcaattacagagtcacattgtggctaatattcaaaactgagatttaaactgaggactaggaaatagaattggatccttttgaagcgtttaggagaaagattttaagagaatgagttccgagtcaccctgtggtcgggaggtgtgagtgagctatccaagcccgttcccatcctttgtccctctgtgtcttctcaggtattgggattctggtcccagagctgatcccgtggaagatttccggtacatctggggcgggtttgcctatctgcaggacatggttgaacaggggatcacaaggagccaggtgcaggcggaggctccagttggaatctacctccagcagatgccctacccctgcttcgtggacgattcgtgagtctgaagttcgcgatcctcctccatgacacgctaatgggggtgctggagtgggctggggtgggctgggggtgccctcaaggcttccatgtctttagagagagccccagggaccagagccaaattggagagcatggagctctgactgaggaacctgcttctcccaagctccaggcaggcacagatgagtcagtgcagtggtgggaaagggaaaagagttgatgttgtagctggaaaagggaaggggaaaattaaagcaaggaaagtgaggctgggggaggggacaaattccccactatgtagtatgtttggtatgtggaagggttctggtcagaatgtttgcccaatgattgccacatcagcattcattttggactctgtatggccagtaggtctggttcctgggagccctggaataatgcagccccttccctaactaacatttccatgatgtatgctcaatgacaaggcagaggaatgtgttggatgagctcaggacctgcctccctggacactcccatcccaggcctgtatatctgttgaccaggaataagccaagcaagcagcctactgtttgactgaatatggatttggggggtggtagagaaagggccggggtggagggttgggaggctcatttgtcattatagatggggtcagacacactaccaaaacagcagcagagatctacaattgagttcacctaaaactcagtgtggacacaggaaaccctcttttaataactgtccaatgggttttccagcctcagctctacagaaaacttgagataacagtggccagtctgcagttagtttgggttcggacaataggcagagctgggaaatggagccaggggcgaaagcccaggtccactttaggatcaggacgggagtggctggtggggaagtgaggtgggtgtggggaggcaatagggagctgggtcatttggtatgggagagtcctctggtggctagtcccagaagtgcatgctttacgaacatatgcttctctccctagggccaccttgagtgaaaccctcccatgctggaattgggccctttcagtgacaacacacaacagttttcaatagataataatcccaagggctttactagcacatgaaacacagggaaaacgtgtaaagttcacaagaaagtcgttccagtgtatcaaatctatcctgtttgccaggtggatataccagggtctcctccacctgtgcatggctggtggtgggtccagtggctgttggataactgatgtattgatggatcattcgccttctgaaagtgccaaactgattagttattttgtgtgtctttttgtgtaactagggtttgaccttccagggcagactgtgctggggcggctgaccccttggggagccaagttattgctcttaccaccaccacttgcccttgtcagtcctccaccctcttgggtttcagtgtcagcatgtagctgtctactcagatcccatccacatcatcaagtctgcagttttttccttgcaaggccttacagggaagatctttgacatagaggatataattttattgacacattttacttgcagagcattcacccgggctaaccagaaagccagcactctgctataaacaaaaaataatgcttcagggctaacatggaatgtgttaaaagattccagcccattaaatgtccaggggaggttttcctgttttcctttccctccatctgggctttgttctcaacacattcattcaacaaacatttattctgcctctaccaggtacagagcactctactattctgcttctctccttttgctttagtttcatgatcatcctgaaccgctgtttccctatcttcatggtgctggcatggatctactctgtctccatgactgtgaagagcatcgtcttggagaaggagttgcgactgaaggagaccttgaaaaatcagggtgtctccaatgcagtgatttggtgtacctggttcctggacagcttctccatcatgtcgatgagcatcttcctcctgacgatattcatcatggtaagccaaatggagaaggcccagaaaatcttgaatactttggttcctttcccctttcctcctgttcatgtgcctggattagtcatgtggccaccaaggagagcgtgacatctagcttcccagcccttccttttagccaacgtgggagacactcaaagagacgaaatctcctgaaggagccactgtatcacagcatcctcccatctcccacttcctgcccaggggtccatggtccacacagacttcccagtcccattccgtgaccatctggagaagctgctattagcagagccctgcacagggtgatagtgtaattaaagtggtcttctctttccaaacacagaaaaaatcagttcagggagtgttttcctgggcttacaattttaactactggctagagttgaaatggggaaagccttttgccttttcagtagcagtaggggaggagatctggattatttacttatcatcatcatggtcacctcctacatggcttcaccaaaaaacattctgctgcctgaaaaagctccaacacctctctctcttttaaaggatggaatttggagtccatccttcctcagtgataaggagtttttatagccacaggcagcatctattggtctgtcctctgcaaacttgcaactcctctgagagctagacttggaaatgaaacattattttgcaatgcgctgctatccttcatttttagctcctccaccgtagatgatagtttgtacttgttaaatgataaggatataaatttaggtcattttttatattttattgggtggaatttggtataatttttagacttcaggctttacaggctcctgagatggactgattgagcttgttctacttcttccccatcatgataggaagtgctgtaccacactaggcagtgtgtgtagtgaccacagactggctgagtgtctcccatcccatgctggcccatatctggtacccacctgatccacaaatgttccatcagatcctgttcaaacaacacatctccagttaagccaaatcttgccctttctccttacggtaaaatgtactaaatctgaaggttttgtctttttaatgttgctccatgatccagtgatctgtggccttggttatgctctgtgctagagtcctaacaagacaaatgctaaggtagaggtcattctgctcaaacaacctgaccccacctggatgtgggcttacatttgcaaagggcaccaaagttctaagagatgaggggaggagctgagccccttgtccttatctaggtttcccttgttctttcccatccctcagtctgcttcttttcccagtaccaacatgtttgtgtcctcagaattaaaggagtaaaaatgtgtaaacatctgactagcaacagccatgagattttgcctggcttgttgataagcagcattgagatctgccctcctaagaatgggccattaggtcttcaaagcttttacgatgtgaggtaaagaatgttcaccaggagtttcatgcacaaaagggtttctctttgtgggaactagaacattgttccagtgatgacggaaacagggctttccataccaaaacagggttttcctttgaatgactctcccacctttcccttgtctcttcctccccacctcaacaacacaggaaagaagctggaagcagggacaatgggaaggtccctttgttactcgagctattagaaacaaaaagaaaagtggccatctgaggaagccacagctggtgaaactgtagggtcacagagtgaattacacctctggcttaagtcagtgaaaagtcctagaagtttgtggtcctagaagtcctaaaagtttatgggactttgttttgagcaaggataagaaattgatttcaggctgggcgtggtggctcacgcctgtaaccctaatactttgggagacagaggcaggtggatcacttcaggtcaggagttccagagcagtctggccaacatggcgaaaccctgcctctcctaaaaatacaaaaattagccaggtgcggtggcacatgcctgtagtcccggctactcaggagactgagcaaggagaatcccttgaacccaggaggtggaggtctcagtgagctgatatcatatcactgcactctagcctgggcaacagagcaagactctgtctaaaaaaataaataaataaaaaagaaattgatttcattcttctgagaactgcaacaactaccttaaagtgattccatccaaaacccacatgttcagccatggacttgcttttatggagctgcgtgtgggtgacacacaaaatcaggagctctgagtcctaatttagacttttatttagatttcctcaaatttgggttccagttaagcgtgggtctcttctgtgccccgctcccctttgccatttgttttatctgttcttcagtctgttctgtcagtacccacaggcaggagagcagaaaggagaaatggcagccacagcagacaaatggcacattcgttccactcagctctcgcatgcccatcacagatacagctcattggtctcttttctatgagaggaagccagagctccagggaactactgccaactgatcagaactcatttaggacatggacctatttgttcctttatgttcctgggaagagcacaggatgaattctatgtactcatttacgtgttcagagagtaaagtgcctcataggatgcctccagcaaaagataaccaagaaggtctaatacctttgacaatctcagtttatcctatagtgtaattggatagcagttcccctagcaaaagttgctagtttggtcctattttctacatagccaaagtgattgattcattggttaatgtgaaagttactgagtactgccagcaggttctaggaaatatatttgtgtgatattcatggatggggaggatcaatccacttccaagtgatttggattaattactggtattttcacctgtgtgggtagcaaacctcagaaaatcaagtatagatgacggcataggacaggccaggccccaggcaaaatgttgaagctcctctggagttccctcccatctccctcttttgttttccatatacctggtttatccagggccctggagatgctccaagaccccctacccaggtcttcctcccttgtcccagctatatttctccatattaccactcttctcaccgaggatttgcttacttaacacataataaatactattaaaagagaaacttaggcacattaaaatgttagagttgattccagcaaacagtgattcacaggaggctccagatcacaagtggttcagggccccactgaggggtagggaagcaagacaaagaaaaacaaagcaaatatttgattggttcaagtggaaagtccctgattacaggttagtgggcagtttgtgattagttaagtttctctaagttgggttttggtttgctgatgtaggaacacagaatgctggggccgtttcaacctaatggtctcccaattaatttttttaacattactgatgactgttaggagtctaatgtgctactcctcccagggaaaatggcattcctaggattaaaggaactcagcacatggagtgtgcgtagaaatttagacactaactgcaggctggtgggagagagccctttagggcagaatgagaaggcgtccggccaagggcaggagttactgacgcatggcctcttggtttcagcatggaagaatcctacattacagcgacccattcatcctcttcctgttcttgttggctttctccactgccaccatcatgctgtgctttctgctcagcaccttcttctccaaggccagtctggcagcagcctgtagtggtgtcatctatttcaccctctacctgccacacatcctgtgcttcgcctggcaggaccgcatgaccgctgagctgaagaaggctgtggtgaggcccttgggctggcccctgtcctacaacacgtttccttggaagggtccgtagcagtcctggaggcccagcctgccctctgagggggtccactttgcctttgacctaaggttaaaaagttcacgtgaggctaaaatgtacaggggcaaaagtgggagcagtcctcaccccgagcgatgcaacagtgactcctcaccacgcctgcttgattcatctgccctggaaagtcattaaaaaaccagttcaactcatgggtccctttatttactcacaagagagagccagcagcccatttcactagttttcctttcctactctttgagaagaatcagaagggagggagcttgccactttactatctgtctaaagagatgtttccattaattaaaggtttttgttttgcttcaaaaaaacttgaattggagtatttccacaagtatctttaacatgctctaccaatgtttgcagaaagaagtgcagaaatgagactgtccacagagtcaggctcgctggccaggagaggactcccgaagctgacttctgatggcctgagaaacttcctagttcacaattcccagacccagacaaagagcactgtcttttctctaattgttttcaaatgggccatttccaccctctaatcagcctctggccctggagggtgcagttccccttgtcctccggagtctccctgtctctgtgctgtagagtcaagaagggacaaccacctgccctcactgggaaaagacagaaagtctgacttgttctcacgactcacacttattaggctccagaggtgtcagggcatctgcctttcatttcttaggttaaataagaaatcaattgctgccatttgtagtacccaattttctaaaatgatcacaatggataagtggcaagaaatccttatgactcatctgtgggcagagttgggctattttggtaatccttgagtaggcagatggaatttgaggccatcttcttgggtacatagatcactaggaagctataggtctagcaactgtggattagggctgggctgagaattgtttcatgttttttgtgactgtatagctagagactctcttgtttgcagagagacactctgaactccccctggccgtcaagggaaagactgccttcaccctcctgagctgaccttacactgagagacaatggggaccctcttttggccctcccctctacctcgagggcatctgggtgctgttgcattggataaaaggcactgctctttttctgtgccctctccgcctcactgcagagcttactgtctccggtggcatttggatttggcactgagtacctggttcgctttgaagagcaaggcctggggctgcagtggagcaacatcgggaacagtcccacggaaggggacgaattcagcttcctgctgtccatgcagatgatgctccttgatgctgctgtctatggcttactcgcttggtaccttgatcaggtgtttccaggtaagcatcctcctctatagggtaaaggtaattgagttcttcagatccccagccctctccattcatctagtttaaatttcatttcttccaagctctttgtcagaaccagcatttgaagtttaaatctagaagttaaaaatccaccagcaaatcctactggctctacttgagaaacaaatccagaatctgatctcttgtcaccacctccaccacaaccttcccaatgccagtctcttccttccactaccacctcccatcagtccattctgcacactgtattcagggagatcctttcagaatcaaggtcatgtggtgtcagccctctctgtcaaatgcttgcactggcttttcctctctttcagagtaaaacccagtgtctcaaccctggcctccaagctgcttcattatccggcctccaactctcttcttcatcttacgattttccctactcctccatgttcctctgctccagccacgtcggcctccttactgactgtttaatacaccgagcgcatttcctcttcagggcctttccacctgctgttctcatgccagaagcacatttctctccccacaacctgcaacccgcccctcatatctgcaggcttgcttccttactttgttaaggtctctgttcaaatgtcccattatcacagggatctttccagactgaagagatctacataactatggctctgtaaacaacattcctccagggttcctgtccccttaccctactttattttggggaacattcttcaccatctgatacaatgatgtatcttatgcatgtatttactgactctctgcccttagtagaatatgagcccagagagcatgcatgtggtctattttgttaactgtgacagtcccagtgcccagaatagtgcctgacctttggtgggcactgaataaatatctaagtaatctgtagcatggaaaatcagcttctgaaaattggctgtttgcacggtcgtgtatttgcttggtagaaaatcaaattttccttcaaattagcattttctggtaactagagctgccccatcttcctctgagtggtctccaagtcagccaatagccttgtgctgtggcagccatgcctggctcttgatgctgtagccaaaagcaggcaggggatggtgaggctggtccagtccatggggagggacaaactcacagctctcagatcatctcagggcagcctttgttggcagaaataggtaggcagccaccctgaataggaggaaggcttctagactgggtcaggaggcctgggtttgcatcctagtggcaagcgtgcattcatttactagggctgccataacaaaataccactaactgggcagcttagacaacagccatttatatctcacagctctgaaggctggaagtccaaaatcaaggtgttggcagggccatgctccctctgaaacctgtaggtgcttgggcactccttgacttgtagatgcttcctgctgatccttcgtctgcacatggcattctgcctgtcttacatggccatcttataaggataccaactggattggattaggtgcctaccttgctcccatgtgacctcatctcaactaatcacatctgcaatgaccctgttcctaaacaaggccacattatgaggtacctggggttagcactctggtatcttttttcttgacagcacttctgacaccaaatgtgtgttttggttttttgttgttgttgttttggcaccaaccaattctcctatattaatgggttgtccaagaattcaattgaattctgacactatccagaattcacacagactccacgggttcagtcccacaaggcttccccgtcttcagatgccagctggaaatgtggtgcccaggctacccacacttttgccaaaatcctgtacttacaatcacagctttaaaatgaaggatgcagctcaggaactgccacatggaagagaagcacagtatggggtcgggggaagagtttctatgctctctctagacgcaccactctcccagcacctcaaagtgttcagcaacccaaaagctctccaaatcttgttgttcgagagtttttataaccctatctccagctccatactcccccattggaggttgagggttgggactgaaagttccattcttcacatgtgtggtgtttctggtgaccagtccccagaaactgcagctatcttggggctctaccctgagtcacatcattagcataaactcagatgtggtagaggaaggggcttattatgaataaaaaaagacactcctttctgccaggaaattccaagggttttaggagatctgtgccctgcacaggagctggggacaaagaccaagtatattttgtgttatgccacagaccccaacatgtctttttggagggagaccaaattcaacccatgacagtgactttgaacaagacatttgaacttagtctgttttttctatcctactagattgttggaaacagatataatagatgaaaattagttgattaaaattgaaatttgtgcataattcaaaagttttattttagccaagctaaagctttcatttattcaacagctatttactgagcagcacctgtgcatgaggctcagcagggccaggttctgggaacagagcggtggagataaagatccagacctgccccgaggaatagacagtccagtggcagcaaaggccatgaaacatacggcaactcttaaaaaaagccgagaccatgattttacaaaatcaacattttgtagggagcagaactttcaaagagaactggactagaaatttgggagtctttttcttggaaccctggtagatccagtagaatgagggatgggggtgtagggttaaaaacactgacattagaactggattacctgtgttggaattcctacatttctgtttcactatctgtgacggggggcagatggctgaatctcagtgtgcctctgtttcctttctcacaagaataatattactacctatctcctggggttgttttgaggtttagattatttaacacatggaaagcactcacagcaatgcctgccacagaaagaatatccagtacatcttagtgatgatcaccattattattatctgactcctggaaaaggacttgatttaattctctcatgaaacgttttcttggaaaactgatgtcaaccaagattattggtcttgctgttgcttataacaccccaaaaacatgactgtgtggataaaaatatgttggaaggggtagtctttctgggagcctgagaatagccatgtaataataactgcaaatatctatagttacaatttgaggttcaggtaaataaactctagatcttatagaactgcggtaaggtaggatagggagactccttcgactttctctgtttatttgtctctatttttaggagactatggaaccccacttccttggtactttcttctacaagagtcgtattggcttggcggtgaaggtgagtcctttaaaacacaaatcttaatgtttgaaatcaactccttgggctctgtgcaagatgtatatggatcacagaggtggccctctatgtaaacggtgtgattcctgatgagtcagctgcctcctggggctctgccccttgatgggcattgcagcgtctgggggaccacctttcacaagttgctgggccctgtgtgatcatgaatggctgatcatggatgaagccctgggtcctgtacaccttgtccagtagactaaattgccctatttaaaaaaggccaagccacttcagggttcaaagaacttttgcagcttttcagtataaagcagaaatccagggaatcatgaaggaacctttgcattcatctcccattgccttccttgtgcctttttattcttctctgccttttcaaaatataaattagtttattctcccaagatgaagactcctcctggggctgaggcagagctgttatcttcagggcaatacctcagattctcctggtgttgatctttcttaggggtggggaaaaaggctgaaagggcatttgcccacaacacatcttaggtaaaaggcacctttactactgaaccaaacaggaggcctagctagagaaagttctagaagcagggaaaagcacagactcttttgtgaggtctgagaaagcaaagaaattccagggtgaaagcgggggactcccctagagctgaagtactctcccatctgtttgttgctcacctacctattctttactttgtattattgggcctgggccaggacttatcctgcaagcactgagatggatgtttgttttctctgggggattagtctttttttttctttttttcttttgttttttgcttttgttttcactgggtcaaacaaacaacactttaacagctcaggattttttcattgtattgacttgtctacctgtaaacttgttaattttttactataataaaattatcatataataaatgaaaaatttcaacacagggcttgtgggcattttatttttctctacaatcccaacagatactctgcctcttaagaaaaaaagaaatcataaggaaaatatgctccttcaaaagtgaatcacaaatatgtttgccaacggaaggcaaatatttttcacctgtctcataggctggactgaaatggatttctaaaactctctaaaaccagaaaagagctgagtgtctccacccaacctccctcctttcacagattaaaaaataaaaaatggagcccaggagacatccagtatcttcccctattggtcacctgggacaaaatctggaacatgcacatgcattgcctggcaggaactcattccagtgattaaactcttcaggaggatgtttcctcttgctatttcattacctatttgtgcagtttgatagctagtaaagtgatcaaaggaactgtggggcatagattcaaaagtccttcaggaagcagaaatagaagaacagtactagaggcagcaggtccctgaccagcaggcccactacctgctgctccagcacacatcctgcacattttcagagggtgggggacagaggggccctgggtggctgttgcattgagaaatctcgccctgctcctgtatgtgcacttgaggccgagagcccttggatgcctggtgacagtggtttcctcctgcccctgccttcctctctggcagactgactggcccttctgctcctcttccccttccaggatgtcctgatatctttttaaaccaaatgccaagtttgccaaaaagtgtctgtttgtgtgtgtgtgtgtgtgtgtgttcaatgcgtgtgtttataccacacttcacaatttgtccaggcttgtattaataccatcaccaggctcaaccctggtgttaattccaagatacttaaatgcccatctaggtgaatttctcaggtaaaccatatattcaagctgtagtttaagctggctgcccgtcatagcactttgaatagactttgtttttgtttttgttttttgagacagagtctcactctgtcggccaggctggagtgcagtggcactatctcggctcactgcaacctccgcctcccgggttcaagcgattctcctgcctcagcctcctaagtagctgggattacaggtgagcgccaccccacccggctaatttttgtatttttagtagatacggggtttcaccatgttggtcagactggtctcgaactcctgacctcatgatacgcctacattggcctcccaaagtgctgggattacaggcgtgagccaccacatccggcccctgaatagacttttactcaaggttcaccatgactttcacatgttttgtattggagtaaaatgtgccagtggtgggctaaagaaaattaactcatttcaaattcaaacctggttttcttaatttttttaaaatcacagtttctgaaactgtgggctcctcatggcacattgagaggaggaggtgaaactctccaagtctgaagctcctgttataaatcttcctctggcaaagattgtgtgatcaggcttgagtacctcacagtcctagagcaggtcaaaggctggctaggaaactcatttgctccctgtacctctcccctcctttcctgcctttgctcgttctcagctcccggtggtagagtaacactggcttctgattggtgcagggtgttcaaccagagaagaaagagccctggaaaagaccgagcccctaacagaggaaacggaggatccagagcacccagaaggaatacacggtaaaaccccgataaagaatacacagcagaggcgaggaaaaggctctaagcactgcagagggccagagcaaaacatctcatggcaagggtggaaagaagcctaggaaactgactctctctgtggacaagtgttaaaccagatcccttctcagaggtccatctgcatgtgtgtggaatgaatggttcagcccagacattagcgcatatttcctggagaaagcaaataccaactatgtagtgtgcctgtgcccttgttaggcaaatcccaagtgagttgcacaaatgtgctgacttccgaggatttagcaagaacaataactttggtcactgggacttaaagcggatatgagctataaggaaagacaaaaataaatgcttctgtgtccagggggaaagagactccaggggagctgactacacttcacttacggcttacaaatctagaaggccattcattgaaaccatcagaagcctttcctgacagtggaagttacctaataatccctaaactgacgacccagatttacaagttttgttttcctggcttttgctgccctcatcttctctcttaaactagttctgtatttctcccaaggcttttcattccctaagcatacgcatttctctgtggccaaaatgctctgggtttagacaggcagcacagcccctgggctctgcctgacagggcaggagagggtctggcctttatccctccagcccaccccaggggccatttcataaaactaaagccagagacctgcagcccctcccagagttagactgcagtacaccatgcctctggcaagatcctcctcccacagtggaaagtctaagccaaatcaggaggctggggactggttccacctcagttgcaggcaaggccaggaggcacggatagaagaaacagtggactttttccccctagggaaagaaatgcttagagctacagtattaagatgacaaattaagctgtgccatatagggtgaaatgaagcagggatagatgggaggtcagggagaagtgagagcactcggtgagggtctgcactggagggggcatgggaggaagaaggaggggagtggggtttgagggatggtgatgaggaagcgtggactgccctacccacctattggaaaacctgggagttctgaggagcaagaagccttagtcaaagtcaactcaaagattcaagccaaggtgactaagagaatggcggtccagaaaaggtcatgggagaatctgaaggcagatgttgttttgggaagatgaagaacctaagccgcttccagaaattcatgaggaaatgccccgtggactgttggcaatgagggcctaggaccaaggttgagcttggggccaactctccctatagacagtgagtgcattctgacaagcatgggctctgggttcaaatcccaactctgccactcatgcctatgtgtccttaataggacgcttgatgtctctgtgtctaaggtttcctggactatggaaatgagcctaataaatgtctaccccttaggaccattgtaagagtacattgaggtaatttgtgtaaagcagtcgaagcagtgcctggcatataggaggtgctgtataaacgtttgatgctagtattactattattattctggagtcttccttgcaacggtgatagccgaagccacaggggcaggtgacgttataggcagaatacaagggcctggagacagagccctggggccatgtaattaggcattatgtttacatcatgttcattttttttcctccaagactccttctttgaacgtgagcatccagggtgggttcctggggtatgcgtgaagaatctggtaaagatttttgagccctgtggccggccagctgtggaccgtctgaacatcaccttctacgagaaccagatcaccgcattcctgggccacaatggagctgggaaaaccaccaccttgtgagtcttccagcagagaagctggctgccatgctagcctgtcatttcctggcttagtctttccctatcagcggctgtctactctttcccacaaattttagtgacaaatatttgcggccccaaaaatgtgtaaaagctttctgcagtattcaaagatcactaatatgtattctcttgatggggaggtagaatacgtttattgccccttttgtgtgccggggaagtggacattcattcagagagttgaagtgactttcctgaagccaccaagttgtcatggctcagcgggggcaaaagccaggcaccacagttgcctcttgtttctcacaccttgagtctttccccccatctcaacagtccatggtggtgatcaagtcatggccactgtcatcatgtgcatggaagctatagagtcctcctatttcctttctcttttcttttctttttttttttttttttttttgagatagtaaccattacccatgctggagggcagtggtgcgatcttggctcactgcaacctccgcctcccaggatcaagcgattctcccacctcagcctcccaagtaggtgggactacaggtgcataccaccatgcccagctaatttttgtattttttttttttttttttttttttagtacagacagggtttcaccatgttggccaggctggtctcgaactcctgacctcaggtgatctgcccgcctcagcttcccaaagtgctgggattacaggcgtgagcgaccgcaccaggccgagtcctgctattttcaaggaacattccttttcctaccaatcattaggcaggcttcaacatcagctgatgagggttagtggtcgttctggagaaagtgaaaaaagaatcagtctctagaggggcttgtggagtaaccgcctggtaacagaaggtcagggcagggaaggcaaaggggctctgcgcggatctctcagctccgcaggcgccccactctcctccaagggacccgagcgccatctgctgagaggagaacacggcccgccatggtttcccaaggagcagcagacacggacctcgcagggggcagcgaacccacgtgacacagtcttcaagtcctttggagagccccaggaaggaacaacagcgtgtacaccctgtgatggaatgttctctagggcggttcagtgtgaatggaatgtggggccggtgccattctaattggttctgtttccctctagtggttgatcgcggagatttcggcttctccatcaggacaagttcagatagcctgagatggtatcagaactcagggacagagctgggtgtggcggccctgcatccatctgctttctctccatgctaactgatatggtcagagagctggaagcaaattccaggaccccagggctccgcaaaggcaaacacattacttcatcggctgctgacatgcaacttcccccaggggttaaaacaatgtttaatactaacagtaataatatttttgagttttactttatgctggcgctgttctaatgttgtaagtgtattaactcatttaagccttacaacaacctaaggacatgggagtcatagttcccatttaaaaaaaaaaaaaaaaaaagcccaccattgctctgaggctttttatgttttggatccaaagctaatattggtggtggtaattcccatgcctggcttcgatcaattaatcagcaaatgcctaggactgcttagggttctggccttcatcaagaccttacccgggctttatgatgatgacacctggcttttcaatagccatgactgctcacccaggaggcaacgcctcgagtcatgcaccgaacaccttttattgatcctctccaacaccaggctccgtgatggctgagctggggacacctgtgactgcacgtgaacattttgaggctgggaatcccaaaggccctcggcgttggcctgggagcaccatgaaacaagtagaagcagagaaggatggcagaggtggccctctgcattagggcctggatgtatacactggtgctaagggggccccacagctaataggggtttgagtttgactgacagccccaggcaggaatctgtgagagttctcactgaacctggtgtgggggtggccctcctaaggcatgttgctaaaggccatctcttctgccactgacgcctgtgttctgcaggtccatcctgacgggtctgttgccaccaacctctgggactgtgctcgttgggggaagggacattgaaaccagcctggatgcagtccggcagagccttggcatgtgtccacagcacaacatcctgttccaccagtaagcgacacaggaactgagaccgccccatcccctctcctcacctctgcccccagcacacttctctagagcccagctcaggggtgccaggcctgggcacaggcagagatacagactcttatttggtttcccctatgtttaaagtcctttgtcctacttgcagtgagaattgtccctgagaatatgggactctgcctctgctgctcagagctgagggctcctccctcagaagggtgaggctgccttcgctctgacagagcagctgatcgatccccgagccccttgtgcagccctgaagtacttcctctctgggaccaaagacaggagaaccattgttcctttttcctgttgaagccacggcctgaaaggcaaacttttcagggggcttttcagttactttttttccccaataagatatcttttatttcttatctaagaagctacgcatagtcattgtgaaagaaaaaaaaggaagggaggaaggaagggaggaaggaaggaaggaaggaaggaaggaaagaagggagggagggaggggagaaggaagcgagggagggagggaggggagaaggaagggaacaggagggaggaaaagggaaggggaaggaggaaggaaagggaaggagggaggaagtaaatataggtaaacaaaaaattgaaaataaaagtcacctgtaatttcactactcagagataaccgctgagttataacattggtatataattttttagaactttctcctatacatgtatagatagataaacacatatacttcaaaatgataaagaatagtaaaactatgcatacaattttataacctgacttttttttcaaaaaaaaggattgcttttttaaacataagatatcaggaacatctttcatgtcattacatattcttctataaaataatatttaatgtttacagattattccattgtatgcatgaactatgtaagccatcctcttattagatatttaagcagggtctgctatttttgtattgtatcataaacaccaccacagtgagcatcttgattgccaaatcaagaatacttgtcctcaattatttctgtaagatcagctgctggaagtggaagtgctaagccactgcttttctcgttgtcccatcctcctagcctcacggtggctgagcacatgctgttctatgcccagctgaaaggaaagtcccaggaggaggcccagctggagatggaagccatgttggaggacacaggcctccaccacaagcggaatgaagaggctcaggacctatcaggtgctcagagctggatggagacagggccacagatggcaaatccatggctccccagtgcacccaggaggcaggggaggcttggagcaggagagcttctaagggtgggaacacctctgtgaagttacaccaaaaatctaagagcagcccccagatcattttccctgcagagcactgtctcacagcagcctgggttttatttgtcctgagattgatgtgcttgaacagtcttcaaagggtctgatccgaggaggtgagggttgccctttctgcatttacaaagcctgaacagtattagggctttgaacgctataaacatctaagaggcagcaccaaaccactgctgggttaaggtacccccacaatgccacttgccctgggcctttctcttcctcaccctccacagccccttaactctcccgtccttcttgtgcctccaggtggcatgcagagaaagctgtcggttgccattgcctttgtgggagatgccaaggtggtgattctggacgaacccacctctggggtggacccttactcgagacgctcaatctgggatctgctcctgaagtatcgctcaggtaacagctgctgctcagtctcctgggctgggctctcactgcagccctagctgtggtccccactctctcacctgccattttgtagctgagtacaggaaccacaatgactacactcagaagggggtttatcagtgacttggtgaatctaagttccagctaaagcctcctgaggtttttacaaatataaacagagaatcactgatgatgcaacctacttcccaaaatattttagaaaattctcttgacctgcagcccttctgtctggaataatggatgctactctaggtgaatgtcttctctgaccatggggacccaggtcacctgcaaacatacctagaagctccatagctgtcagatgaccactcaggaccagtgtgagggtgacctgctgggcattcagtgctccagagggtggccacagatggaagtggctcctctgtcatggcacctctcagacaaggggctcagatcagaagagacagcaagcagagctgagtgcccatagaggtaacagcacggttcaaccccgtggtcaagccagagctttcccccttgctctactcacacagcgttgccccgtgcctttctctgagggtttgtcatcctgaaatcctcattgctattttctttctttcttttcttttttttttttttttttttttgagacagaatctcgctctgtcgcgcaggctggagtgcagtggcgcaatctccactcactgcaagctccgcctcctgggttcgagccattctcctgcctcagcctcctgagtagctgggactacaggtgcccgccaccacgcctagctaattgtttttgtatttttagtagagacggggtttcaccgtgttagccaggatggtctcgatctcccgacctcaggtgatcctcccgccttgtcctcccaaagtgctgggattacaggcatgagccaccgtgcccggcctgctgttttctgttaatgacatctccagttagtgagagtatgcacgtgtgtgttctttatgaagagtataaatccagagcttaatgatccagaaaatgtacatatgaaactccctagatgctgaccataatacatgagcccctaatatagagatttatttgaatcagatcctatgctggatacagagacactgtgtgtggcaatgctttacagtatgtaggaagctatgaaatgttagttattattgtcctaatatgctggaatttgctgctgaattagttcccttgggtttttttttttagttaactcctgatttttgcaactatatagccaggaaattgctgtacaccctttaccaacaatgcccaacccagggcaggcctggtgattgccctggcccctaccttgcaggcagaaccatcatcatgtccactcaccacatggacgaggccgacctccttggggaccgcattgccatcattgcccagggaaggctctactgctcaggcaccccactcttcctgaagaactgctttggcacaggcttgtacttaaccttggtgcgcaagatgaaaaacatccagagccaaaggaaaggcagtgaggtaggtgtctgcccagggaaggaccctggcctgggtgagaaggagcacacagcacggggctgccactccagacatggctactcacacaggctctcgccaccagaatcagtgtctttgttctgggaccatttgcagaagatttcgatgaacacattctgaagcctcctcctacagagatgctttagccaaaatgaaacaactagctttaaatggtctgcaagtattacatgccagattacacaccagtttggtgcggtttggtgcaacatagaagtgagtgtcttattctgtaaggttaggctgttttaagagcaattggttgagcttcatttcaacattaatattccctaattaaacctgaatttcagtggtaagtgaaaactaagaagaggcctccttgggtgctataacataaaaatgatgaaggcaaaaagtaccaaccagcagagaccacttcagcacatcaggagacccagttttatgtctgtgctgcgaagtgaacaaactgtgtcatcctaggcaaattatttaattcctccttttttttagtatttttttcttcttcacatggaacatgaagctaatgacctctgcttctatttcttagggatgtgaagataagtgagataaagtattataaatgtgctctgggcttcttaagaacaggcattgctcacattcaaatggtcatgattatgatatggcagcattatttatgcctctggtttaagtgtctggctgccgctggggtttcctatgtccatccacggggagggaggcacagaatgtctcccacaggcagaacctacagctgccacataattgatgacaagccaaagggacccttggaggttctgctcctctctgtgtgtgactcacacactctctaggataaaatcaagcgactacaccctcaaaatgctcagatgaattaacagattaaacagtgaagaaaaaaatgtgttgactacacttggcagtgagaaataaataaagcgggcggtgacagcagctggcatcagggagaggctgtcatggaagggatgtgcatcttgtcagtcatcccatccatctgttgcaggggacctgcagctgctcgtctaagggtttctccaccacgtgtccagcccacgtcgatgacctaactccagaacaagtcctggatggtaaggactggacgggccatacttgggttccgtctggcagccatctcccagtattgctgggtgtgtcctgttgtgatgcattttaatgggagcaaagagaacactgggtacttctgcaggtcacacagttgttcttttgctttgagcttctttctcctcttccttcttccttcattcccaaagggattttaaaagtcatgcacctaaaggccctctccctttaatgaggaatacactctgtgctcttacccttagtaagccatcattcctggggtccccctgccctggctccaggccacattccttagtgtctggggagagcttcttctacatgtgtgccgtggcgccctctagtggaagcatggtgatgcacggctcttccagtgaattcgtggagtcagagattgcacatgtggatggcaagtctggaaatagcatacacccctgttatactcctgattctcccctcagcttcccaatttcccagtgattctccctttaattaggatgcactgaagctctcaggggtgcccccatctccaaggagctgcagtggagaggctatcccctctctatgtgagagaatgtgtgagaagcgtattcccacacaggagcaaaactaaacttacgtactgatgcaggttaatgaatggggaaagtatctgcttatcaaagaaaaggcatatttttctatttagcacaaactttttcaaatgttaagaatttactaactgaaatctggtgaagcaagagaaccgggcaatatttgcgttgtctgatcattacaactggagggaacatgctcagagaggcatcatcactgttcatgcacctgccctctctttacactgagagaccctgtgatgaacagaaaacatctttttaggatgacatctctgggtctttctcctagcctgccttgctgtgggtacctatctccctgctctctgaaccttggtcaagaagtttatatttgttttaaattgatactaatatgttaagttactgtgatttgccaaaatcagattggaaacagggcctgcatggctgaatgattcttttttttaaattactttatttctaaataaaggttttctttgtatagaatcgggatgctgtgaatggtgggaaatgcactaaatagttatgccccaaataagaaagggaaaatcatttgaatccccagttagctccttgaaagtcttttcacttaaacacacccacataccacacacacactcacagacctccctcccagatgcccaaagccctgctgacctacagagctacttctggaaaggctgacacatgcctaagacacaattcctgggaatccagcagctttgggttcaatttccttcctaaaagaacaatgaatatgacccctggagagctattagggcagagctgcttccttaacgtaaaggactctccagcctccgtatgaagtcatctcagagctaaagacaatcaagtccaacttgcagatttgacataaagcaagacttccaatccggctaggcagaaggattttggttgaaaaccatgaaatcccttcatatggatcattttttaaacaacaaaaaaagaaaagaacctactgggtgtccacaactctgagagctgctttctgaagagtcatgttttgagtcctggaatccctctccctttgacctgcctctcaagacaatgtgcgagagaactctctcttcaagtgcatgcaagtgaggttttcacagttagatttttaattttaaagtaatacacatttgtacataaaattcaattctgactgtatacatgtgtcagataaacagttgatacctgacacttgttcacagtctatgatacgcaccgcatatcctaccctctcccccagcctctctccatggcttctcaaccccccctctgcatttcctgtgacctgaggattcagttttgtttgtggaggcaggtgcaatcccaagagaaactgtgcaatcttctgagaagttagagtaggcatgtgtgtgtgatttagggaaggtacttctcactcagcttggtcaccggttccaggtttgtgtcttgggcaagtcccccatagctggtgacagaccagaaaaatgaaaacaactttgacttagccctcaagttttcagtgaatgagaatgaaaaacaaccatgagtaagagatttcttaccgagatgatgtaaaggataataatagcagccagcactcacctatgtgccaggtatttctctaactgctttgtgtagtttgactcatccagtcctcaaaaacaacaatgaagtggataccagtattttccccttttcacagatgaggaaagtctaatgtgacccacccaacataacatagtttgaggggacagagcatttcgttgaacagaggaggaactggcacaggaaagttgcatgacccccccaccaacctccgcccccaggttgcacagctagctagtcgggaggactttgcttccgtttccctctgcctctcaatgatgatctcagggccaactaagctaaaagcagacttgatggagcatcagtcctctgaaagagtcactgccgagatacaaaatacctcttcttcaaaggggaagtggagagaagtaggaaatctgggtaacctcacagtcttccagtttctggaaaacagagctggcatcagtcttttttcttgtcctaggggatgtaaatgagctgatggatgtagttctccaccatgttccagaggcaaagctggtggagtgcattggtcaagaacttatcttccttcttccaaataagaacttcaagcacagagcatatgccagccttttcagagagctggaggagacgctggctgaccttggtctcagcagttttggaatttctgacactcccctggaagaggtaaagtagagattccagctggtttctgtcaagtgccagaagtggcggttctttgaaaaagtctaacattagagcaaagttttgtaaaagcaaaaagccatcgttccccacccaagcatagcaactatctttatttttggcatagttcccccatctctgcatgcatacaaattttatgtacttgtggttactgtgtgcttacgtttttgtatttatagaagatgatgttctcagatagagtcgtaatggattttcttcccattatgaagcaatacccaacaaaacagagcttgggttagatttttctgagaataagaatgactaaacaaaattctctctttttttcttcttgacagatttttctgaaggtcacggaggattctgattcaggacctctgtttgcgggtatggtgctggagccagtggcttgttcccttccttgcctccctcccaagttccatctcgaaagtctaaggggctgggcacagtggctcatgcctgtaatcccagcaatttgggaggccaaggcagatggaccacctgagttcgagaccagcctggccaacatggtgaaaccccatctgtactaaaaatacaaaaattagctaggtgtggtggcgcgcacctgtaattccagctactcgggaggctgaggcaggagaatcacttgaacctgggaggcagaggttgcagtgagcagagattgtgccactgcactgcagcctgagcgacaagagcaaaatccatctcaaaaaaaaaaaaaagtctaaggaaaaagtcatgaaacaacaaagcaggcaaatactcctccatagtatctgactccccagtagtaggcattttgcatcctagatggctttgagtgacaaaggaataacagactgagttaggtctagatggggacactttggatgaatgaggattcttacggaggtcaggttggtagcttcatccctcagctcctcatgctgtatccccagtctctcggcctgccatgtcatcatcctcatctcctcctgtcatctccaccaggcctctgatccatctctgtctgcatgagtgacagctggcagagtccttaatgtttatcaaatacaactcagacgtcagtctcctggcccctttgagatcaacataaaatcattttgaacccttatttagtggtctatgggctttgaaaacatggggaccaaaattcctgtggattctagaagtctctcttctacatgtgtcagcctgggcaccaactagctccttccatgaacttttatcaaacccacagccacacaaagcatgtgtgagtgtagcagagtttacagcagagggtggagggtggggagatagatgtgtggaagggttacctgccacacaaacagaaaccacttctgatagaacacgaggtgtccacccacactgtaaaatcctctcctggtacaggcaaagctttgcagcgattctcctttgctgcccctgggctcctaacacctcctaaaccaccagttacctccttctttccagtgtggcatatttcagtgttttcctgttggagtgtttcctttctatgtggattctggaatcagctcttaagataacttggttttcatctttcttcataatgatcccaaacatctatctactatgcctagaactaccaatggacacatataccagcccagatatgcttcagcccatcccagtacatcgcatggtgaccaaaagatgtagtcgtcctggcacagtgggtgtggggcaggaagcagtcctctccaggggacagcagcaattcaccacagaacccaagtttctttcaagctctgctgacacagaaattgaataatctcagctcacccaatgtcaaagactcatattaaccaagaccagaatgaaaatatgctaatttatatcagaagctttgctggattcaagagttagggccttttacctgtgcagaatattccttcttgataaataggccctctcaggagaataaattacacatcagaggactgtttagtcagcataggcatagaacaggatgttccaaagatacagtcaaggggagtgggtaagagtgtagcctctggagtgaggccgaccaaatatcaaacctgagcttcataatttgcaaactaactggctttgggtaagtacatagcctctttgtacctgtttccccatctgcaaaatggagataataatagcatctacctgtagcattgttgagagaattaagtgagttaatgcttgccgacttataacacagtatacgatcactgattaagacttagcaactctaaactaaatgtttacaaaccatctcttacctcaaagcacttaacatccattgtcttatttgattatcactgtaatcttatgaagcaggcagggcaggggtctgccccatctggggggaactgagctcacagaggttggagggtttgcctaaagtcacccaggccactgggtctcactctctggtcttagctctgtaatctaggatgctcaatgccacactctcagccacttttcagatggctaagtacatttgttttgagttagctcagtctcagaggatgacattttctgatcttgtctccagtgtttaaatgaacctgtagctgtgcattggggtcacacaatgcgtggcatggagagggtctgtggctgactgccacggttactacgtgaaaccatcattacagcagttactactgttactgcctgagaacatcattacaagactgaacgaagggatcaacatggaaatgataacaaaaaaaccaaagtaactgttttaaggaaaggctagcatcgggaagaagaagagagaagaagagaagaagaaaagggctccctgcttctaatgagtaaaggcagctccctaagcttctgcagcccttcattatttattgggtaacaggaggaaggagcaggaggtaatgattgggtcagctgcttaaatgatcacgggttcatgttgttactgacagatttcaattatgcctaatcataagaaacatttgtgcagcctccaacaagggtcaatgccacttctgaaggggtgactcatagtcagtaactagaaagcagcagatagctagggacaaactggcgattctgaataggcctggaacccttagctctggccaggtcagtgggctccagtcaggatggagccttcagggagagatcaaagctcagaggtttgagatgatatcagccagcaaagaggaggggcagtagggatcctcccagagggagggccagccatagaagacatcaaatctgagcccggatcaggagaaggagcctgcagaactggggctctggcaccgagaacctgcagaacttcgcccctctgagtgcaggtgccagggctggggctgccacccagccttcgcatcccaggcctggcacgtcataggtaaatgtagttgaaaggatgactgagctgatccaattccctttacaactgtccttgtcctgggggacttgaggagggttaagaaagcagctggggaccaaccaacagtcctctaggctctccatgtccagcaatagttgttcagcaaatgagcattaatcagtgactataaactgtagcttcaacataaccgacaacttgcaatggtttctagagcatgctcccatgtgttatctcatttaaatttccaaaccaatcctgtgaaatgttctttttttttttcttttttttttttttgagatagagttttgctctgtcacccaggctggaatacagcggctcgatcatagctcactgcagccttgacctcctgggcccaaggggtcctcccacctcagcctcccaagtagctgggactacaggcacacgccaccgtgcctggctaatttcttttctagttgtttgtagagacagggtctccctatgttgtacaggctgatctgaaactcctggggtcaatcaatcctcctggcttggcctcccaaagtgctgggattacaggcatgagccaccatgccttcattttacagataagaagtctgagaaaactcagatttaggcagattgagtcacttccccaaatttatgtatcttgtaagaatccatattcaaacctcagtcccctaactcttagttcattactttttctaccacttctcagtatcctctaagaattcagaaagaaccacatcgactctgatttttcatttgtttaagtacacaggtaataggtgaatgtattttgttgtttaaaaattcatataatacacaaaaggctaaagtctcgcttcccacttcctctcccctttctacccaactctgcctccccagggagagcttctgctgacagtcggtggacattctttcagagttttacaattatgtgtgtgtgtgtacataagatgtcagtttttctttgtgtaggatacatgaacatgaattttaaacataaatgtgagtgtattacacatattgaccagcaccttagtttttttgtttgtttgtttggttttctttgtgctgtttgagaaggagtcttgctctgtcacccaggctggagtgcagtcttgcaatctcggcttacgcaacctccacctcctgggttcaagtgattctcctgcctcagcctcccgagtagttgggattacaggtgcctgccaccatgcctggctaatttttgtatttttgtagagagggggtttcactatgtaggtcaagctggtctcaaactgctgacctcaaatgatccatccacctcagcctcccaaagtgctgagatgacaggcgtgagcctccgtgcccagccagttttgtttttttattaaccaagttacgtattttaaacttctccatgtcaatgcttttagagctattttgttctctttaatgttaatagagaattttaaggcaatttcaggtgaatctatacaatttctctgtataagtaatttacactagaaatagatttttataaagatgattaagctaccagcctggtatttcattgctgacttaaatgaagaggaaaatcaatgctgtaagggaaaaaaaaaatggcattagagatccagaccttataggcattttccaaattattaattcaatctctcaaaacaggtggcgctcagcagaaaagagaaaacgtcaacccccgacacccctgcttgggtcccagagagaaggctggacagacaccccaggactccaatgtctgctccccaggggcgccggctgctcacccagagggccagcctcccccagagccagagtgcccaggcccgcagctcaacacggggacacagctggtcctccagcatgtgcaggcgctgctggtcaagagattccaacacaccatccgcagccacaaggacttcctggcgcaggtactattgtcggtcggtgtttagctgagctcagtggctcctctcccagccttcccctcctctcctgagtgttccttcaggcatgggttataactcagcaaggagcaccctctttagattctgctggttttgtttcctgctttccaaacccttatcttgattcttggtaacatgaatcttctttgtaagttggacctcccctagcaaagaaaatagaataatagtgaaaatgttaatattgtttttatttttacagtgagggataaagtcatgttttcattcatttttgcagtgaccctacatatcaaaatcattgccctcttttttcttttaatgttgtttaatttagaaaaagaagctctggtttaaagaacagtgagtcacgtgacttgctctttgaaatgccctttgaagtctggctgaacactgggctgcattcagattcttcagtggccaccagaacattctgttttcttctgcacatcttacctttgcacaccctgcttattatgttcccccagaagcccaaccctctccaccaggggctgattaggaggctgcaggataaatgtttaaaagaatgaagatgtgtgtgcacgcgcacgtgtgacatctccatgccacagtcatgtttattccacgtctattctcccacagatcgtgctcccggctacctttgtgtttttggctctgatgctttctattgttatccctccttttggcgaataccccgctttgacccttcacccctggatatatgggcagcagtacaccttcttcaggtgcgcggactcggggtcaccattctcctctgtgggtttggggcacctgggtcacatgctgcttagaagggccctgaccttcccacttcactgggaccttcaccaatgagagaggggaggggtctttgggctgcctgcagaaaggaacttaatgtatctgccactgcttggaaaggcgatcctagtggacaggcaggactgcttgggaaggccgaatggggaaaggaatgcaaagcttaggtgaatgggttgaagcgccatctttttgaggcataggtgacatgccatcagaccactgcgagtgttcaggcagcctaccgcactcccaggagagctagcgccatcccaaggcagcattcggtgcctccaatacatacctggcacacagcagctatccagtaaaggctctgagttgcatgatgttggcacgcgcctgctctgtcccagtcacatgtctcactctgtctagcatggatgaaccaggcagtgagcagttcacggtacttgcagacgtcctcctgaataagccaggctttggcaaccgctgcctgaaggaagggtggcttccgtaagtgcctacgcgcccctgtcctaagaagactagctcccctgggaggacccaacggtgggttcaagatggcaggcgttggggaggccccactcaatcctgctctgctggtcacttccatgtctctgaccagcactcccccaacctctccttccacacttgtgtgcagggacattcactacctcctaggaagcccccacaccactggacagctctatatttctcagcatagaagttctatgttgagttgacagatgattccccataacttatttgaaaggcctctgagcagggagggagggaaatagggttatgctattgtgtgattgggccttgaatggcgtgagtgacacagtggccagtactttgtgatagttgtgagtctggagaagggagttagcgaaggccattgacatccaccaggaatcctaaaagttcaatataattttaacttttctccctcagtctttttcaaagctgtcaataaggaccaaaacagactaatttcaaattcctcttctggttgctgtgtctctcaacagctagagctgctaggaataaaaagggagacaaaacgatccacaagctagagatggttattccccagccccacacctagtcagtcacaaaaccctagttttgatattgcttgagcagaaaccagcctccaagagaataagaagaaagggcctgggtctaaagaggaggaggaaagggttgggcacaatttcttatgcctagggatttgtcagcaactttgaggctgattatggaatattttcttgtcttccatgagggagtacccctgtggcaactcaacaccctggaagactccttctgtgtccccaaacatcacccagctgttccagaagcagaaatggacacaggtcaacccttcaccatcctgcaggtgcagcaccagggagaagctcaccatgctgccagagtgccccgagggtgccgggggcctcccgcccccccaggtacctgacctccaaacaacggggccccaggtctgcctgccacagagggactaggggagtccctggtatctcctgagtctctcacaaactaacatttcaaactggcagttgagtaggggactaaaccaaactccctgcaccctctgggaggggctccccacagggcgctgtggctgccaactggaggaagccactcaccaaaagcttcattttccaccagatacttcctatttgatctagtagaaaaaatgtgtttaagcactaaaaaaaattaagtcatatgtgctcattatagaaaaattagaaaacacaggtaagtcagaaggaaaaaaaatcatcgcttggatataaacacagataatgtttggtttgcagccacccaaacagattatattccaaatattgtcttaaaatctgatttactgcataatttactaggaacatgcatccatgtcaataaatagacatctgcatcacttttaatatctgtatattatcccattgtttgaatttcttttttttttttttttttttttttgagacagagtctctctctgtcacccaggttggagtgcagcggtgtgatctcggctcactgcaacctctgcctcccaggttcaattcttgtgcctcagcccccccgagtagtggggattacaggcatgcaccatcatgcccgcctaatttttttggtagttttagtacagatggggttttaccatgttggccaggctggtgttgaactcctggcctcaagtgatctacccacttctgcctaccagagtgctaggattacaagcgtcagccactgctcctggcctaaagttactttaaattaactgatctcccattattcgccacttaggttttttagttttcaccattataagcaatgctatgatgtacattcaaatggaaatgtgtttacacacttattaacagtcttaattaagaagctctccatgtgctgtgtctctaacatctgcaggtatgtacacaaatacatgcacagccagcatccatcttttgcagggacattaatgatcttggctctgagcagcaccctgtcctgggagttctaaagtccagaacagattacagtgagcatctcctgggggatttagagacatcaaagaaggctgtgtccgtggttgataatgggcctcccagctgacttgccagggctgggccttagacagccctgtccaatgatttgtcaatgaataaactgttcccaaacaggctatgcagttcagtgggaaagcacaggtatgggacacggagagccccaggtggactacttgacctctctgagccttaattttatcacctgtgaattgggaataactgcttatttcataatattattatgaggatttaatgaaatcatgtgggcaaggaattatttagaattagattcaactcaagtgatgacaaccccaaactaacagcagataaaacaagacacaacttgtttctcactcatctaaaagtctacgtgggtggtgcacgatgttctattctctttctcctccacactaaacaggcctcagcctcatcagccaataaggcaggagctgccttccaggcagcggaatggaagaaggatgaagcaaaacagagggcagagtgtgcacatgtgctatgtttagggaaggttttctgaagttcccacatagtacttccacttacaaacccaacaaaaaaggctatggctaaggcagcagggaggagcaaataatgggagcaactagattttgccacagcacctatcacagtctggtttataaatggttctaggccaagaacacccgatccctgctcttttttatattctaaagcatgtatctttatatttctcaagcaatattttctctctttgaatcacagctcatctgctgcatcatagggatcccaaaagaaggacccaaggaacttgtctcagtcctctgtgccccaagaggaagctttgcttgtttgctttgctgtcaatgctgagggctcctgtggctgcctccactcaaaaccctccagcatcaggacgtcaaggctgtgatactgtaccctgagctcttggccagggcgagggaggggaggccaagcctacctacatggtgtttcatttcctaaacgaacccttacttccacgcggtctgtccagcttagaaacttattttcagtagtgttggtccttggtccctggacaaaatgtaacagccaaagtcctagaaaaaggcaagccagttcctgccattttctttcacttctgcatttcctcactattatacgtgccttccattggagcaaaactgaatgccacgcatatgcacaggagctgtgcgcgctctgtctctctcactcactctttttctctctctctctttctctctcaatctctctgtctctatctatctcttactctttatctctcactctctcactctttctcactctttctctcaatctctttctcattctctctctatctttctctctctctctctttctcacacacacacactcacaaacccacactcttattcacatctgctcaccctagccactcaaacacaatccctcattcagcctggaataagtccagagggcgtgggcctgattcagagacaatcagttgttctcatctgggaaatggggcaatgtggtcatctctagggaccctccctgctctaacattctttgaatgtggtgggtcctgaggtggaagcactctgtccctgacttctagtatatgtggagatagggttacacaaatattttattgggcagaacttttataaaacaatttatcataagctatcgcagccagcagcaatttttccaacctggattccaccaggggagcttggccggtgtctgagtgccactttcagcttgagaagcaggtgactcagtgaaaagagcaaggaggagacagaggcagattcagttcctaggccctgggccacccacctgcaagtttgcagcccagtcagtgcaagtcagctaactgttctgaacctcagtttctctgtctgtaaattaagctaaaaattcttctttcaaagagtgtcaggatgaagtgagatcgtgtatgtagggcatttaacatagtgcccgacacacagggagcattcggtaggtgccagctctcctcctggcaggagagagagaaacaaggtgaaaagagtgaattaaagaagaggaaagtcaaatgggaaaacagggggaggagatagaaagtgtatgaaaaggaaagaatggtgcgcaataacggcggtgtaatgccaccaaaatcccctcaactacttctgggcagcacccttgacagagtgaatgcttttatgagaatgtaagcggaatgtgttcccagatttgcagtaatattgccacctggtggacaaacccatgcacctttgaattttccaaaatatttcgatgaactagcttccagtcctagatgtattttgaaagtgatttgtaaattgtaaggaactattcaaattctttcattaatgtcacaaatcaactgtgtcatctgtatgccacccactattctgggtgctggggacacaacagctcacaaatcaggcaaagtccctgctctcaccaaaatgatatcctacgggggattacagatacaaatacgtaaacagatccatcgggaggaaactctcagatggaaatgagagctatgaagataacacaacagtacatgacaatacagagtgactggaaccaggaacatttctccgaggaataaaatttgaagcgagccatgagagggtctacaggtagagttcccaggcagagtgaacagccaagcacaaagctgcaccaggagagagaggtgctcgccgagagacagggaggggagtgtggcaggtgagctcagagaggggcagggccacacacatcggccacatgggccttggtagtgagtcgagatttgatcccagggtttattggagtggataagtaagcaaggtgactgaggtgctcgggtttacatttttatagttcaagctggctgctgggtggaaaacggaagttggcagaccaaggacagaatcaggcagacccatgtggaagtttctctagtggtctaggtggtggcttgggtagcgtggcagtattggagctggagaaacgcagatggattggagatttgttttggagtgacgccattctgtcttgtcaatggattggcgaaaaaagaggcatcaaagatgagttacacatcattgaagtgagaactagggagatgccagtactttatttagtattttctcagcagctcaatccataaataatttttggaagacaacaagcagtttcacaaactacttataagtcctcaagttccaaggtaattaacgtgggtgtctcattgcctcagagaacacagcgcagcacggaaattctacaagacctgacggacaggaacatctccgacttcttggtaaaaacgtatcctgctcttataagaagcaggtaagaagaaatccttttatgctttttatcctggctccctgtagaagatattaactagggacagaagataattttctctctcaatttatgtatgatcagggcagtagatttttttcttttttatctgatttgagggccccattcaacataaaaagcaattgaggcacatacaagtaaaatgtaacttaagattaattctttttttgttgtttgtttgtttgtttttacatttagggcaagcagtcttaaattttaacccacgtattattaaaagttatatcagaagaccatagaagttattcaaaaatgcagccacatattttaactagttaaaagagagagtaaaaatttggagggaggtggaggagtataggggaaaaggtagaagaaaaagagaaaataagtaagtggcaaaaaagagaaaggaaaaagatagggtgggaaagaggcagcgggacagtgtctgagtccagcacacgccagggcgagccaggtcaactgcagctgtcatattctaactgtgaattatcatctttgatcactgccctttgagatgccaatgaacttttcaagaaatatctagttctcttggctctccagctgttcttatcagccccatccaggatggaacagctttggcagcccgtatcagaacaagcagcttgacaggggcatgccatgccaggagagaggatcctaaggaagcgtggtccagtccgcacaggctctggggctttaagataaaacctcctgtctaactttagtaggactttctgttgcttcacctgccagagccctgaacgagggataaattgacttaattaactagaacacactgcaaatggtgaaagcatttagcaaaacaaagaatgccatccaagccccaaaataaaagcagaataaatagaatgcaataaacagcaaccatcccaaactgagttctcagcagcaaatctccagtatgaaattttggattttgtgcgtgtgtgcttaaaggtggatgacaatgacagttcatgggattgagctctggggtccagagttggcatctgttcatttcccattttgtcattttacccttgattgactgaatgtcagtgccttaactttgggctgtggagtgagtcggaactcccccgaggtgtgcaggtggttgttagagtctcatttttgcagggtggaagacaggagggctgcagccttcattccacactgacatggtcattgccgtgtgttctgggtccagatcaggcatattgacctgacatatgacctgacaacaggaccactcagaaagtccagcatgcgggatatgatttggagagccagtgggggaaatcataggtcctttctctgcatgtgtattcaggcaatgtcccagggctgggcggcttccgcattgcttggatatcggaaaatgcaaaaatgcccctgaagactgagacttcagtcttcaaaatgaatgtttgggaaagaaagttaacggcactgctgtacttgtggtattcattgcattattttattttggctttcagcttaaagagcaaattctgggtcaatgaacagaggtaagaaactatttttatcagaattaaaatctcagattgattcattgttgaaataattgcacacttttaaaaggcacacctcacagccatgaggaggggctgttctgtaggtgctcaggaagtcacaagacacgtcctgaagaatatgtggctagggacatcccagactcagaagacactcagtggtgcctcttcttggaggacataagtgggggtggcattccctgatgtggcgtttcagagcattctcacccaaaaaaagcttctaaaacctccaagtatataacagtttataatactccaacaagagggccttgtagcctaaacccgggacactccttggcccattccttttaagcttcagggagtgtgggccagccccagactcaccccattcctgaggcatcctggaggttgaaatatttccagaggtttagaacctcaccaagtgggactctaggagcctgctgcctcccagcctccctcaggaactgcacctccagaacaggtgcggggctgacatgtatgtgctttcctgggcagattctagaccgtacacatgaaatctggctttcaggattgctctccagagggacctgtggggcctcggctgagacagagagtaggagtgaggcagtgattcaaggccctgagaaagagctcctcctctgcttggtataaccagctaattcattctgttctgttgactttggcttctgccctgcctttgaagggtttgaggccagggagtgatgcactcagactggtgtttccacacagtcacttcagacttccagggcagtacaggagatagatcccagggccagtgaagaagcagagcacaagtccaggcaggagaggctaagggcctccctgaacaggtgtgaggcacagaagccccgagaggtagggatgacaggatgaagatgggtcctgtgctgctagaagtacctgcaaagcacagaggtggcacagaaaaggagtccttggctgggatgggaggagatgacatgtgacatgtgaaagaggacctggagttggctcgatgctcccaaaagggaaaggtgccgaggggagctagcagccatgcaaaggcagagacatgcaggcagtctgggccatgaggagctctggaagtgactcgatatgtccagaataggccactccagggaagggctgaggaaggatgaagttggagaggggcacagaccagatgcagaagggcctcagaggccaggatgagggtttggactccttcctggaggcagcagcagtgggaaaagagttaaaagctggtttgtaaagtggagccatgttgctcgctggtccaggcaattcccccgaaagttcatgtttccctacaaaacccgagagagctactagtaggcgtgaagttcgtggccctggtctgaggatttcctgtttccttgtcaggtatggaggaatttccattggaggaaagctcccagtcgtccccatcacgggggaagcacttgttgggtttttaagcgaccttggccggatcatgaatgtgagcggggtatgtaaacagactggagatttgagtaggatttttgacttgcttaactaccatgaatgagaaactctcatgagtgataacaggaaaaaaaaattaaaaccgtcttgtttgtttgtttacatggtttttagggccctatcactagagaggcctctaaagaaatacctgatttccttaaacatctagaaactgaagacaacattaaggtacttgacctatgtataatctgctctggagctaaaaatttacctgagctggttattttatttttactttcctaccttcattaaattccatccctcctcctgctgaaatctagcaaggaatgtcttccagctaccaaacccttcctgcttctcaaatttcctttccttcactgatttctgctttaactagctgttagtgcagcgtctcagatgtcctctccaccctctaggtgtggtttaataacaaaggctggcatgccctggtcagctttctcaatgtggcccacaacgccatcttacgggccagcctgcctaaggacaggagccccgaggagtatggaatcaccgtcattagccaacccctgaacctgaccaaggagcagctctcagagattacagtgtaagccaccacagccccagcctcaccactttcttgtcaccttctccactctttgaacatcctgagaggattctcaccaccgcgaagtgctgatttggatggtaatgctgtttagtcaggcacatatgaacatccgactttcaaataagtgcctcacacttcacataccagacctcttggtcattctttctccccaacatttatgtggcaagtaagtttacatttggttccattcccttttggcttttgatagcaagttgctcctggagcttatacaattattatctttgctatgtgcaaagcagctgccaggaactggcaaagttcagtaaacctttcagctccctcggagtaattatcttagattccaggaatttcctcagaagagcatactttggagatgtcgacagagctttgctaccctcaagctgaggctcttcttgcacagtttcagccagtggagacagtggccttgtgcgttttgtagtatgttcactctatttgaggcctacatggaggaggggttggtaggagcacctttgttagtgcaaacttcagcaacgttgtggggtcctgattttactatcctagcacacgctgagtgccagtgaacatgcccagggtcatccactaaaacctgggccttggctccttggtgtcttcctctggacaccctagggccctagactgtcctctgttaattctcactcagccacactttcgtgtgtctccttccagtcatttgttctaagcttactacgtgtatggatgatatgatctgtagttttatcaaggtagtgactaccacataggatacctttgtggaaattagtaaaaatgctcttttctgcaggtggacactgtcccatgccaggggttatggcttgtacataaagttcaggctggctttagccccaacttacccctcagccagatgccttctatttgtccgaggaaagaataaatagagccaagtccctgtacaacttgcctgccctcttttcacttaaatttacatcatgaacatttccttgtgttacgatgtacttcttgaaaatgtgatttaacaagatgattattaacaaaagataaatctcacagaccgtatgtctgtcaacatagaaaattcaagagactctatagacagattattagagctaatgagagcattgcagtacataagattaatataaacatctatttctatacaccataaaaataattagagaatataataaaaagaaaggttgtctagaaatattcacatgaaatagaaaggcaacccgcaaatacccatttaaccttggtccatatggattaagacagtttagtggagtgacagcttcaaggtagagaagaggaacctggaggccacacctgggcgggtgtaaggccttcccaaagcctgactttgtatcttctcctccttctgctcttccctcttcatcgccctctccctgtgtctctggccctgctgcaggctgaccacttcagtggatgctgtggttgccatctgcgtgattttctccatgtccttcgtcccagccagctttgtcctttatttgatccaggagcgggtgaacaaatccaagcacctccagtttatcagtggagtgagccccaccacctactgggtgaccaacttcctctgggacatcgtaagtgtcagtttacagcgcctccctcccctccgtgggcccaaggtggagcttgtgtgtgctctgaaggaccagaccaagaggggaggggttctcacggtgccagggctgctgaaaggcactgggccaagggccttgtgtatctgctgtcccttgacatcttctcagaaaggcacagaactaggagcccgaagctaggaaaggctgtggggtgcagcttaacaactggtgaacgggggctctctatgtcctgcactgaggggtcttctgacccatcaaataatcactgcaccgcaggcatgagtctggccttcctggcatcagtctggcgctgagaaggtaatatgaaggggtctttcaccccaagtccccttctcaaatcctgccccaccttcaaaagggtaaaggtaaaactttccctgtggtagggtcaccagataaatacaggacacccagttaaatttaatttcagatgatgaataatttttagtataagcatatgctacttcaaatattgcacaggacatatctacactaaaaaaaaaaaaaaaaaaaaaaaaaacctggttgtttatctgaaactcaaatttcactaggcatcctagatttttatttgccaaatctggcaaccccagccagtggccaaaataataagaccttcacttattagattaaccaccgctacagggaaaaatgaagaaaaaatatttattaaatcaatagcacactaccaccttcctgacaaccaaggttggtgggggtagggaggggtcaggatagcgtaccctattacaggctgcagggtcaaaggaattggtagtaaaggcctagttataatgtaacagggatcattatgacatcaaccccaatttattctaggtgtcttgagtagtaaaatctcaacattttaagaccaacatgagcctccatttcatgtgatgataagatataccaactgatggagaccaacacaaatgaccttctcatccatggttttttaaaatgatggtgaatattggaattcctgaagatatgatttctatcttactcagcttagtaagcagctatcacttaacaatacaaaaccagagattatcagtagcaactaaattatttcctctctcttctgtctacacgaggaaacactcataaatgcacggggaggaggtcagaacctgaaagcctttctttggataagagcatcaactgcaggtaccacattggccctgtgatgctaatataaaaggagctaggcccaccggtaccgaaaagttacttagaaaagtgcggaggcttttaattttactttttttaaaagataagaaatagaatttacacacttggggctggcccacgtgtttctgtgtgtgtgtatgtgtgcacgcacgcgcgtgtgcgcttacagggatctctgagcctatggagagagatgtagctaggatagagtggacatctgaggtgggaggtgatactagctggcagtccaatgaaggggtagaagatggtaggcatcatgttagcaggctttctgatgctccagaattttaaagctggcctggaatctcacctccgcgatccatcattttggaacttaggaccaccattagccagtggcaaaaaaaaagttgaatgaaggaacaaacaattattgcttatgtaattcacttagcacatatatgatgttttaaattcttatatgtgtcatctatttttctttactttaaaattttgcaacagttacagacttatggaaaagtcacaagtacagttgaaacctttttttcttagtcatttgaaagtaacttctcagcaagatgccccttctcatttatttctctcttcctgtctctctctctcacacccctcagcacgtccgatgtatacttcctacaaacgaggatacaccccatacaaccacaacacaaactgtcaacatgaggaaaccagcactgatgtgtcatcaccacctaatcctcacaccccactcctctttcgcccattgccccagtgatgtctttcagaaaaaaggatctagctcagaatcatgcatgacatttgattgtgctgtttctttagtctcgttcagcctggaagagttccacagtcttttgttaacactcatggtcttgacactttgaggactgcaggctggttattttgcagaatgtcccttggtctgagcttgtctgaggtttcctcttgcccaggttgagggtgtgcatcttggcagcagtatcagcaaacagatgctgtgttctcactgcatcctatcaggtggcttctgatttcaatttgctctgttactgatgatgttcaattcggtcacttaagaaggtgtctgctgagcttcttcactgtaaaattactcttttcccctttataataaatacaaatttcaggtagaggcacttcaaagatatataaatatcctattcattatacaattttccatttattcatccatttatttatctctgtatgcagtcatggttcatgtgttaatcaatggactatgatccaagactatcattatttattttgatattcacattatccccactgtggtcagtggggggccgttgaagctggcttctgtatcgtcttgacttgggtcctcatgcccctggacctcctccatgctcaatggcacagcaagatattccaggctcatccttccattatccccattcctaccctctccccaagaagccctggttcctgccagtgggaagtggccctcagaagccaaggtctgagtgctagatatgttcattgcctctggagcaccattggtcccaggccttctcagtgatagaactagggaagatatggatgtacacacacaggtatgcacacacctctatctatagttctctatctacctatacagtgaacactatgagctctccaaaaccaactccacagggctcattctagttttttttctttccacatctgtaactcccttctccaacagtgagacgctggcttctctcactcccaactcatttatctaccggacctatacacctgaacagtgcccaactctgccaccatcccctccccatgtggatgccgtcctctccctgctccagctgcctctgctgcatgcaggtcctcctcgttctgctctggctctgataccctgcaccagatcagcctcctgtaaggatatctttctcatcccgttgaggcctccacaccccacggcaggttgccccctgaggaagcccgtctctggttcttgccctgctcctgatcaccatggctcctcccctaaccccactgttgccgtcccctttctgtgcccagtatagtggctgtaggactaaattgtttaaaaagggtatcattatttatttgagctttgtgaagccaagaactaggctttaagtttttctgaattctgaagacatgcttagaaagaagaatcaacaaaactttatgaccaaatagaaagagtgagagaccaggcagaattttgtaattgatcctttcaaaagatacaaactaaaggttcccttggcagggaggtagggcatggggtggggtaggaggactagtgacagcttaacatatgtttgccaaccaagaactgtttaaaaagcaagtcgaatcagaatcccagaccctacgagctggaggagcctggccccacccctcattttgcagagctggcagcaggtctgagaggttaagtgacttgctctcctcttctctttccgagatgaattattccgtgagtgctgggctggtggtgggcatcttcatcgggtttcagaagaaagcctacacttctccagaaaaccttcctgcccttgtggcactgctcctgctgtatgggtaagccgtttgggccattagctaatgcctctgaagagaagcctggtggtgggggtgggggatcatctcctgacagaaaacctgggctgtcctgtggtggtagcacccacaagtttagcttccggccccaggtagggtctgaagctgataaccagggatctgtctggcttctgattctgactccactgacagaggtatctctgaggcctggtcctgtcagtgacaatgagagaagtcccacatgatctgaatctcctactcaaactgaggccttgaccaaagcctgggggcagccattccccaacccctcacccagctctgactctcactcatctgtggccaatctgtccacctcagtgtccccatgtgaactggccaagagttaccgcccacagtagaagactccggccaaaaagctcctcctgagtcagggacagaggatgacacaggggttacatcagcagagttacagggcccagcatgcaactttctttcccacgtgtgtaaatttgaatgagtaattcatccatctcggcctcagtttcctcatctgtaaaagaaaatagtgatcctggtccttcctctgtgggccagtagagccttgccaaagcattgttctccacatctttctcttggaaatagagaatttgggaaccaacctgactataagctgtgaagatgagctcactgggctcatctgagatgacctcagctgggctttgctgacccaggctagagtgggaggtgttgcaggctggagaaccctcctatgaattgtacagggctttgtagtttacagagtatatacacagctagcagcccatttgctcctcacaaaaccccatgaagtggtcaaggcaggcatcattatctccatttaaagttgaggcacagagaccaacaaatggagtatctctctggtcccctgggactctggccagttcacacacatcacctcaggtgtaaggggagtgcattatatccagacgtattgtaggtggaatggaatgtggaactccatcactctgagttgtctcatttcacacagatgggcggtcattcccatgatgtacccagcatccttcctgtttgatgtccccagcacagcctatgtggctttatcttgtgctaatctgttcatcggcatcaacagcagtgctattaccttcatcttggaattatttgagaataaccgggtgagcataactttcttggcttttttgtttgattagtaggatagtagagtatgtgttggtcgagcagagccaggggcaagcatcgtacatgtagcagctgtatgcggatgagtgccactttcttcctccctacccccgaccctgcctcctttccttccttccttcctcccatccttccttcctctttccttcttctcctccctcctccctccttcccccgtccctccttccttcctttttcattgcttccttccttccttcgtccctccttcccttcctctttccttctgccctctctccctttttcctttcatcctccctccatccctccctccatccttccttctttcttccttctttccttcctataagcacctttttcatttctgtgctctgaatgaaatggttttctgtgtttattctgcaagcaaaacttgattcttgcaataaactttaagctttgcttactctttcagaaaggttttctcagggactttgggtgttgggttttacacacacacacatcaatacatttgggtaatttcaaaatctaaaaggaacaaaaaggcatacaatgaaaaaatctccttcctacccctgtttcccactcatgcagttctcttctccagaggcaaactcttacttgagtttcctgtgtgctctggagacacatcagcagatccctatacggtctttctcccgctttcttatggaaattgtaacactctgacatatactattccttgggcaagttaatcttgatgaagagactgggtgttctccatgctgaatgcctcacttttatgagctgccaagcccagttgtcccttccacctgacctccccctgtccagagacagatggccaaactgaatcataaaaagagggggaaaaaaagaaggcagtcgctgcagggctgtctttactccacactccacactcccagtccccaccgctgtgtctgagtcctggctgtggctgtccttggaacatttgcctcaccacgtgcctgtgtccccaggcgcctcaacctttcctctcctcattagctcttcccagttcagagggtgggaccggccagcacatctgcactgctgccctgccacacccacctccacctgcctctgggccccactggggaacacaggacaaatctgtgcggaggccccaccatgaaccgcccagacccgtggacccctgagactgactctttccagatcttgttagggtttcgtggctgctaggcaagtaacgaagcctcatctgtcccatgaatgataagaaattcagcatgtcagagtcagactctggaaaggcggggggataagaacacagccccagcagatggccagagcacccaggtgactgaaagtgctgctttgcagagctgtgtttgccacaggctcacagcccactaagtcttaagacagttttccttcagaataattaaatagccagcttaaagcaactcagaacattttcccctctgaggctgcacccatttagccaacatttgctaagcacccgccttcaaaaacctggtattttcatgtaaattatccgatacacagctgctatggaaacccccagtatcccacaggaagctccccagctcccagcagctgccggcccgtgtgagatcaggaggtctttaccagctgaacaccacgtgccgggtgtgtgctgatataaacaagcgtggcccactcgtcctgccctccagaggctcccgttccagtcggaaaaggacctgcccacgaagtttgcaacgatataagccacagtgtatgatcctccataatacagcgtgtgacagagcagcagaggagcgaggcagataacatgctgcaggccagaggcagcgggaagagccaggctgcaggggctgggggagccgtggtggaggaagttcaatttcagcctgtagatttctattagcccatttaataaataatgaagtgcctactctgagctaatcattgtgcaggtatttaggaaggacaaaaaaataattaggactcagtgcccaccctccaggggcccactgactagtagagaaagtaggcagatttttaaaaaattaatcatgggaatgtgataagtgctgggagagaggaatggatactttctcatgggaatcttggaaggcttgtaagggaaggcactctctgagccagctgtctaaagaagaacaggaatctttaagaaagcagaagggaaaagagcattctttcctgcttggagcaataggtaacagcctgcacatgcccaggcctagaggccaaagagcacagtgattccagaaagagtggggagaaagggtaggcagggaaggatgaggtaatgtgggcgcaggtgtggaggctggagagggaggaggttgtgggactgggaggagccagatggaatggacagcagtggcccagccaggagctatgctggcctcgtacgcctcgatgtcccttctattttctcaggggaggctctgcccaacatgccaagtccgaccacttgaaaacaagtccctggcttaacacagaccccagagagagtctccaaccctcctctccctagacaatggtagttgccctgtgaggggctgaaaagcagagctggagatggctcagggcctggtgttaacaaatgccttgagggctcctgttgtttcaaagtgagtctgcagggagagctccctaagtggacagcaggagggctgcagcttctctgcacattcctgctgtcacccccagagtcacctaggggaggggtaaggacagtaatgcaggttcctcacagttagcctcggtgcccacatggtactgagcatagtaaatgtttagaagatgctgcctggctagacaaaggggaagctcccgcccactagaaacttgcagggagccccagtccttgattggtcatttaattgattagctccttggcctggccttgaggcactgcttgtaagtacttcatgacctccattgcaaacccatgatgctctgctggacaaatccctccagtggccagtctggctgcaaggactctctgtctgcaggccttgccctgtgctgtcctgtgagagcatctgggccccacctgctgaagagagggggggtggggtttgccccgtttccaacagtcctacttctctgtttcagacgctgctcaggttcaacgccgtgctgaggaagctgctcattgtcttcccccacttctgcctgggccggggcctcattgaccttgcactgagccaggctgtgacagatgtctatgcccggtttggtgggtggtagccgaggcccatggagcatgggccctgggtccaaagctgggagggttaccgggggggctcctgcatcagactgtggcaggggctggtgctaggaggggaccttgttgggctggaggtgtcctgccagctggagaggattagggtgcctctgtttccatggctggggagccacaggagggatggagggcagcccttatgaggcgggtgtttggctcttgctcagttcccacataaggcctggtctagtgggccctgtgctgtggccaggtctgtggggtgagctggggcggctgaagtggactcaattcctgttgatgcccaggtgaggagcactctgcaaatccgttccactgggacctgattgggaagaacctgtttgccatggtggtggaaggggtggtgtacttcctcctgaccctgctggtccagcgccacttcttcctctcccaatggtacgtccatgccacaccctgggccagtgggcagctcagggcatccagaactggaccttatacccacatggtcatttctttcctcaggagccccactccacaatgttttttctacattctcaaagcctggcttttctccaataatacaagtagaggatcgggttaaaataggcacattcaaatatgtgaagagcatccactttaaaatatttaaaatgcagtgctattaatttcaattgctgatatttaatccttctcatttaattaccaaatgtgtattttgattagatgatagtattgcaaataacaatggttacagggtatccaaagtactaggaaatagactaatgtatttatgagagaaaggacacagcaggcccctttgctaattagagatttgggagcatgggagtaatatgggagccatgtggaggggtgcgggcagtgatcacgaccccccactcctggaggaaggtgggtagctgccaaccctgacttttgaccagggcttctcaaatgccaggttagctggcaattgccattcttccgcaggctcttcctgaagctgggtgggcccctgcctcactcccctctgcaatccagtcctacctttattgtcctcacccaggggcctgaattgccaagcagcagcccttcctagcaagctttccccaatagtgttttgtttcttaacttttcctcctctcaggctgagtgtggtcacctgtaaatagattccaaggacttggttttatgttttgatccacagggaattgatttattggaaatgaatctgcctttctactcacaggactgtgagaggtgaatgagatcacaggtgtcaacacacgcctgatgaaacaggatacacaagcagttctagttatgggagacagtgtcaggaattgttgtccttggcaccctcagcccctgcagaccctttctgcagccttggccataccttttagaggcttttgtgtgggagagagcaggtcaggaggttgactacccaaattgactcattagcttcaaactctgatgtcaacacatttgaatgagtcctgcctgctttagggcctaaagaggaccagagaagtacaccatagtccctggcttccagaaggtcagggagggtttcaaagaagaggctgtgtctttaagaatggggaagattccatttggtggggcaggaggaggagaacattgagggactggaaacacatgcggaggctgggagacgggaatgaccaataggactgggaaccagggggagatgccaattgctgacagaggagttagtgcaagaggtaagtgagaagggtaggtggggctggattgcagggctgtaactacagctgcagagggagggcttcaacctacagctgatggggaacaacagaaggttttgaggcatgaggtggcctgatgacaactctgttttggaaaggtggagttggcagggcagactggaggaagtgggaggctcggaggttagtaactaccccttactgagtgcttgctgtagaggaagcattttagtcctgacggtgatcccaggccctgagtctttactctgtgccaggcactgtgctgagttcatcttcagcacaatcctatgagacaggtattgttaccctcctcctcatcacatggttgaagtaggcaaggttcagagaggtccaatgcccaagatcacacatgaggaggccaggactggaacccaaggctgactctggacatgagcacctgacctctctacctaatgcctaatgcctctcctgctgggagccctttttagaatttaagtcttaaaggatggaagcccagaaggaagcagaagcaaggaagtggaagagaggtcccatggaaaggacagtgccaaggacactgtacagccagcccaatcctgaccccttttcttcatctaggattgccgagcccactaaggagcccattgttgatgaagatgatgatgtggctgaagaaagacaaagaattattactggtggaaataaaactgacatcttaaggctacatgaactaaccaaggtaagggaatgggtatgagtttggaggtgctggttagatccacagttggcatgatgttgccattttccttctatagaacaattgatatgcttatgcaagcaatttggttcccagttttatgtagggtcatcatccctgtgttataactcgtcttccaagagcatctaattccaatgtgtgttccctgctattcatctcgggcactgacacagggcctcagtgagaatcactccagctgagcatcattcccttttctgtgttctgtttctgcagagcatgggtcagcctcgagatgtctcagtactcaccacacctctgtgcctgcccatgtcaatatgtaacctcctagtgctggtagttttctcctaaaccatcctttgctctttgttccctcttcccctccttgctctcaccctgtctcagttctcagtccggtttcttcgtatcttgcagatttatccaggcacctccagcccagcagtggacaggctgtgtgtcggagttcgccctggagaggtgggtactctgcagaccacgtgtgaaaggcttccgaacatcagctcttgtgcctgcctctcctccccataaggcagagctattcaataggaacataatgccataatgcaagtcacatatgtaattttaaatcttccactagccacatgagaaaagtaaaaagaaaataggtaaaattaatttcattagtattttttattttactcaatataaccaaaatattatttcaaaatgtaattaatagaaaaccttattaatgaaatatttgacaatttctcgttgtttttaagtctttgaatctttacactcagggcccgtgtcaactgggacttagatgtgtttcaagtgcttagtagccacatatggctcgtggcctctgatggcagcccaggtctaaaattcctcccccagctcacacacacacttaccctggggcctgacattttagaccttcttgatctctagggccaggctagctctgtgttttctcctagtgctttggcctcctgggagtgaatggtgccggcaaaacaaccacattcaagatgctcactggggacaccacagtgacctcaggggatgccaccgtagcaggcaagaggtgagtatcctgctcctcctgtctcagggagtctctcacaggtcctgtgagaagaataggaagggtgatcatcagaccctatagtagggtggctctgaggccctgaaagatctgtacagagaaggaggcctcccagagagcatggcccaaaaagcccaacacatagacccaatggaaaagtgaactgaattgtgatagttaagagattcctctgttgggatggattcttggaaagacctgggaagcactaagtgtgtggttcttaatctcttagaggtcacggaaccttttaagcatctgatgaatatttgtagcctattcctataaaaatgcaccattgcttcccattacctccctccacacatttttacaaaacgtttcagggagtttactgagccccaggtcacatttatgatcctgcaggagctcttgaatcccaggttaagaacccctgtgatgaatgaagaatccttcctctgggttgagtttctagataggggctcatgcatgggcctttggggtagcctaacctgcattggctatttgtaggctgatatttggctttgccagaccaaggagcatagagggaaaactggcgtgtgcccttggattctggagggtgactgctgctctctgtaataaaatgtgtttaaacagactggtcccctatgggcaggacagagaggatgagctctcactcatctgcctctttcctggctgcaggaaaagcttgaacagtaaaacttcagcacacacaatagaggtgcccagaggaagcctctgccctggtttataagtggagttaggtgctgctgacatctgtccagcatctgcttgactggggcctcttcctctctcctgaaagccatcctcagcatggcccaatgcccagtgggcaggacgagtcctgagcacgcttcactggctcagacaggatgaatttgattctttggcctccatagccagccctactgggtttacagaaaagggacaggcaggggtgaagccaggtcatggctgagtccatctcaacagatccagcttcacctgcaagtgaccacgcaggtgacttcctcatggtgacaaaaggagtcatggcagggtagagatatcataccatggcaggggaaagatatcatagaattttccatgagcacatttatgagacatcaagttacaactgtgtccaagtgaggcacagtctgacatccagaaggtaaaactgagctggacgctagaaagaaactataggcttaagacacagaattgggattatatggtagggtagctcccactaatttggaaacgtaccctacttgcttccctgagtagttttaattggcccagccatgcctttggtggcttttgtcattgtggggaactgtaatggtctctctgtaccatcctatatcatccatcctttattcatagaccctaagctataagaagaaaaggatgagattagactaaatgtctatgtatagtttattttccatcttggcaatatattttttagtgggggtgaatatattagccaaagggagttggtggaacccaactcactctacccctgctccctgcaggcctctcgctgtgggtagttatctgactggctcctctttcattgctatctttgccaataaatacagatagagaagtttacttccatcgggacacatgcatcttttctagttacttcccaaatgtctgaaaattattgataaatcatgaatcattttcttaaacctgatcttccctctgtttttaaactcacatgtgaggtgatctgatccaaaatgaaagctgacttttggcgtaacagggattcaattaatcctagacatggaaacatggaagaatctgacaggattcagtttctaaccgaagggcccctgttttgattcccaaatatcccatgcatttctgaagccaaataggagaagagaagaagcagcttccttttcccgttggcagaagcttctccagccctagctctatggtcatccctccactccttgaaggatactcagtaattgctttttttcttgcagtattttaaccaatatttctgaagtccatcaaaatatgggctactgtcctcagtttgatgcaattgatgagctgctcacaggacgagaacatctttacctttatgcccggcttcgaggtgtaccagcagaagaaatcgaaaaggtgaaaaatgttttgttgtggccacataggagtctggttaattacaagcctgtttcatgagagtgcattctcttggagatgagaaactgaagcgtgctattcattcattcattccaacaaatgtttactatgtgtctactgtgtgccaagtactgttctagaaaccaggagtatagcagtgaacaagacagacaaaaaaaaatccccactctcatatctaacaaaatgttgtatgcatttatcctctgactcagcaatcacacgtctaagagtttatcctgaagatgcatctcccacagtgcaaaatgaatatgtataaggtgatccattgcatttgtaattgcaaaatgctggaagttacctaaatgtttagtcattgtagattggctgaataatttatggtacagacacacaataaagtcttacgcaactataaaaaagaagaagaaaagtctcagtaaactgatatggagatatttccagtaaatactgttaaatgataaaaagcaaagtggaaaacagaacatagagaacgctactttgtatgtaagaaagaaggaaaaacaagaaagtaaacgtatgtctgcttacctttgcaaatagaacgtagaaaggataaaccagaaaacaatgaatttggtgatcaacaagaagaaaatgggaagaaagaaaaatgggaggaaacagtacttctggggatatatttttgtatagttttaatttttggaagcatgttaatgttccacatattcaaaaaaaatcagtaagaatgggaagtaggcaaaaatgaaaacaaaaagaaaacctaacactgacagcaaactaaataaagtaacccaattttatttcaaataaatatcataatcttgcaaaagggggatagagctaacacaaacaactgctgaacacagtgtttgactctatatcctcattcttgggcagggtggagcgggggagaagaactacaaataatttctgagttctttttagtttgttttttatagtggtataggcaaagtgattctgaaaattttagatgtgttacaggattaaataaattaataaatgttttgatgttattgggacccagaattctcaccgtggaagaagggacttacaaatatggaaaagggaaaagcaagaaagaactgtgaggtcatggataggaaccggaggtagcactgggaattcaggaatatttatatgcttgtgtttgtgggtgcatgcagatgtgttcatgtttcatgcacataggcatgtatatatagacatatatttgcatgtgtgtatctgtcttccgaaaggctcaagaagcaaaaacaccccagtagccatgagcacacttagcactcaggcttttgtcttaataacattccccactaaaagtaaccctgattcctccaataaatgataagttccagggctggaatggcataggtataaaatgaacctggaatatcttatgccagaaagtaaggaagtgcttttaaaaaaaaaataaggggctgggcatggtggctcacacctgtaatcgcagcactttgggaggccaaggtaggaagatcgcttgagcccaggagttccagattagcctgtgcaacatagggagaccctgtctctacaaaaaattagcaaacaaattagctgggcctggtggtgcacgcctatagtcccagctactcaggtggctgaggtgggaggaatgcttgagcccaggaggttgaggctgcagtgagctgtgatcaagccactgctctccagcctgggaaacagagcaagactctgtctcttaaaataataataatataattttaaagaaataaaagtaactctgtacagattgcttattggttacatgggagaaacataataattttacaatggagaaattagacagcaccttaactgggtgatcaaaattaaccataaggggcagatggacatctcatgccccgagatgtgataccctgtgaaggacacaatttcacttatgtagaatccagattggagatatgtaacctgaatcttatcatgaggaaacatctgacaagctccaaagaaggaatattccttaaaaaaaaaaaaaggagactgtattcttcaaaaacataagagtcataaaagacaaagaaagagctatggaaatatctctgatcgcaggaggctaaacaggcataatgactgaatagcagacaatagactacatcttgtgcagaagagaaaaaaaatgatagaaggatattattggaccaactgacaaaactgaactatgaacagtagattaggtaaatgtatcataacattaagtttactgacattgataatgtactgtggttatgtaagagaagatctctattcttaggaaatatgccctgaagtatttaggagtgaagggctgtgatgagtaatttaccctcaaatgggtcacaaaaaattgtgtgtgagagagagaagggttttattagttaataattctatgaactatttttattcctatatgtttgtgtgagtttgaaactatttccaaataaaaagttaaaaatggagattacattctagtgggagggatagacgatctgtagataaataggtaaaatatccagtacattagagagtgaaaagtcctcagggaaaagtaacgcagggaggaactgctggggcagggtttgcattttgaggtagggtggcccagggagagcctgcagaggagagaacctgaatgaagaactagaggtgagagaaggagccacgtgcacacctagggaggaacattccaggcacgggggactagtatagaaggcagaagcatggtgagcttgtctccagtggcttccctagatcccctcctgcgcatgtgcacacacacctggtgtctctgtcatcgttccctcacagcactgtcacgatctgccagtattctgtttattttgactgccacctccccgcagtctgaggatagcagcaatggctgtgttcacattgttctccagtgcctggttcagtgcctggcgtatggtcagtgctccataggtatgtgtcggatgcacaaggctttgggtgtaaccctcttgacgggtgggatcaacaggtctgggactcaccatcttctcaaacagagccttcctcctccactgctagccatggtccaggacgctgggcgagacccactgtcttgctctttgtaaggctgaagtccatttcccaggcggctacacccaacagatgctgagcaggctgggccaccctgggatccaagacacagagagaaagagcccctgtctggcgcctgaagcacatgccagaggacaggagccagcaggagcctgtttcagcctagctggggatttcattctggaggcgtgagatctgggagcccaaggctttgaactgggggaggtttggggtgtttgcttgtcttctccaaatggcatttctttctcttccctaggttgcaaactggagtattaagagcctgggcctgactgtctacgccgactgcctggctggcacgtacagtgggggcaacaagcggaaactctccacagccatcgcactcattggctgcccaccgctggtgctgctggtaactgcgggcttgggccgcaccaagggcttaaaccaagtgctgggtctcttgggttggggaaataggttctgggtcggcagatttagaaactgcagcagtttggctttagtctggactgtttcctgtgttgctcattttgagcgatcagcccagtgtttggttcacacagctccggagaaaaacaagtcacggcacagccttgacttgggactgcgcacatcctgcgttcccaggatgtctcctgtggggccatcggctcacagccgggaagttcagcccactctgcggcctgtcggtgtctggtccccatacaggagcactgagctgggtcaaaggctcctgagctgagccaggccaggcctgaggccatgcccacgcagcccaaggatcatgagggcacaggacatagcgggaaccaaggaagtgacctgagtgacctccctgccttctgacaaatgtatttgcaggattttctttttttgaggagaattctgtcattgccttaatccactttaatcccctcgtgggctgaaatgggcccaggatggacgccacgcttctttactcttggatccacctcctgccttccctaccctacaccagggtacccctgtcttgctcaagtgaggggagtgactgtgtgcgccttctgtcagctcatcctccacaggggagccagcccagggggaagcagtaatcagaagggccagctcccagcctgtgcccccaaccttctctccaccccccaggatgagcccaccacagggatggacccccaggcacgccgcatgctgtggaacgtcatcgtgagcatcatcagagaagggagggctgtggtcctcacatcccacaggcaagagattcccagggctggggaaggtgggtgggaatcctctcctgctcacctcctctctcctgccccacagcatggaagaatgtgaggcactgtgtacccggctggccatcatggtaaagggcgcctttcgatgtatgggcaccattcagcatctcaagtccaagtaagcagatggtggggcgtgccccttgttgccttctgtggatccacctggatcctgtgttctccattgacacttggaagagtcctgctgctccgtcatcccctggggcagaggcaggtggtggctgggcctcattctccagcagcagatggagaaggccatcatgctgataagaaactcctctatattggcctaatttcctgtggtcgaagactcgcccaagtctctggatggggcatctgatcaggatgcatgcagagcctggctgggatgagggagggctgctaccactgcctcaatatttcaccacttatctcaacagatccgggacctgtggcctatttactaagagtccactccaatgtaggaatggttaggagaccaactgacttgaggacccatctttgtttttagaatattgtatgcttttgagtttgaaaaaagaccatatgttatatgacaaaccaacaatggcagtaatcttgaataggattatccttatcctgtacccacacattgtaaactattgtagataattccttattattaagagtttgcatgccaaagctaacagtttaagattatcagcatattgccgtgctcattcacgttctgatatgctttataacctagaaaagagcagagttacaattactcatttatttaacaaacacttattaagagctcagaatataagtcactaagctggttggtgggaggaacagcacataacccaccttatctatgctgaggtgcataatcctgatgcacccacaggagggtgttacacagaagatgtcatcctttcatatgtgtcagagcagataaataattgagagaaaggtctaatagattagctgcttgtggcaagtggacgtttgacccatgatttattgagcaactacaacttggacactgcatagatatctatagaaatagcagcatgtcaggtcaccagacctgtgtcagcaacttcctgtgtccaactgctggagaaagggaagtctcctattcctttccctccagctccttaatatctccatgatagagggggtgagaggggagtgttccctgtgtggagggatggtgagttttctggagctgaaaggtaaacagcctttctcctctgcatcttactgcagaggagaacagccctagactgtggaggaagctttggagtcagttatgactgacacaggataccagggcatagggtactgacacccgctagccgtgcacacactctctggtggaccatcactcatccaagagagggtaaccagccatcctgctgaaggagaaagaaagcaccaatggcccaagccctagcagctccattgtttcaggaagcttcctcagggaagtgctgccttcccgagcctttgctcccacctggcccatcagcccttaccaccactcagtatgcactggtccacgtgtctttatgggcagtcttgggatccccacactgggctaaaactacctttgacggccaggtgcagtggcttacacctgtaatcctatcactttgggaagctgaggcaggtggatcacttgaggtcaggagttcgagaccagcctggccaacacggtgaaaccctgtctctactaaaaatacaaaaattagatgggcatggtggtatgcacctgtaatcccacctactcgggaaactgaggcacaagaattgcttgaactcagaaggcagaggttgcagtgaatcgagatcacaccactgcactccagcctgggtgaaacagcaagactctgtctcaaaaaataaaataggctgggcgtggtggctcatgcctgtaatcccagcactttgggaggccaaggcgggcggatcacttgaggtcaggagtttaagaccagcctggccaacatagtgaaaccctgtctctactaaaaatacaaaaaaaaaaaaaaaaattagccgagtgtggtggcaggtgcctgtagttccagcctctcaggagactgaggcaggagaattgcttgaacccaggaggcggaggttgcagtgagccaagatcatgccactgtactccagcctgggcaacggtgagactgtctcaaataaaataaaataaaataaaataaaataaaataaaataaaataaataaaataaaataaataaaactacctttgacttcagcaagtacgattatcccacattaccatgcagacatttgatctctaaaaactggtatcaaatgatttctccagggactaccatggtttttctctcctagttttcagtatgtacacaggtctatggtatgggcctttaatccccagtatttctttttttgttgttcttgtttgggtttgtttcttgtttttcggtttttttgagacagggtctcactctgtcacccaggctggagtgcagtggcatgatcatggctcactgtagccttgacctcctatgctcaagtgatcctcccgcctcagcctcccaagtagctgggaccacaggcatgtgccaccatgccctgctaattttcgtagagacagggtctttcttgttgcccaggcttatcttacattcctgagctcaagtgatcctcccacctctacctcccaaattgctgggatttcaggtgtgagccaccaagctgagcttaatccccaaaatttctgatgagtctactccttattttgggattaccttaggcccaaccactaacagaggcctgtcctgcactgtgtgcatcccctagatttggagatggctatatcgtcacaatgaagatcaaatccccgaaggacgacctgcttcctgacctgaaccctgtggagcagttcttccaggggaacttcccaggcagtgtgcagagggagaggcactacaacatgctccagttccaggtctcctcctcctccctggcgaggatcttccagctcctcctctcccacaaggacagcctgctcatcgaggagtactcagtcacacagaccacactggaccaggcaagttggccctggggcaccgagagctgagcaaagactggtccagaacacccagtgtgggttggaattgccataagagggaggcataacattcccgatttttaacaaactcttgccctctgtttattggggtaaaagctgatatatcagaaattgttttctaacaatattttttagtcatcaggaaacttcattgattcttttttttacattttccttccctgtgatgctatggtgtgttatttcattcttgctcgtttgtggtggtggtttttccttcaaatcagctttattgatgtgtaattaacatacgatgaaacacaggttctttgggaggccaaggcaggaggatcacttgagcccaggagtttaagacaggcccatgtaacaaagtgagactttgtctctacagaaaaaaaaaaaaaaaatcagaaaattagccaggcgtggtggtgcatgcctgtggtcccatctacatgggaggttgaggaaggaagattgctggagcccaggaggtcaaggctgcaatgagctgtgttcataccactgcactctagtctgggtgacagagcaagcccctgtctcaaaaaagcaaaacaaaacaaaaacacctattttaaatgtacagtttagtgagttttgataaacgtgcattccatgtgtggtttttaaaaatgtaatcacattttttattgcggtaaaatataataacataaaattgaccatgccaaccatgtttaagtgcacagtgcagtggcactaagtacatttacattgttgtgcaaccgttaccaccatccccgatagaactctttcatcttgcttcagtgaaaatctgtgcccattaaacactaactcaccacttactgcccccctcgcccttggcaactactgttctactttctgtctctaaggctctgactactatagatacctcatataagtggaatcatacagtgtttgtccttttgtgtctggcttattatgcgaggacttagcataatgtcctcaaggttcatccgtgttgtatcatgtgccagaatttccttcctttttcaggccgaataatattcctttgtacgtatatgtgctacattttgttcatccatctattcattcattgatagacatttgggttgtttctgggttttgtgtttttatatatgtttttttaaaaataaacatctttagagacagttcagtaaagcagtggaaacagggaagtctccatttaacccctgaggatctggctcacctgcaccttctcatcagcattaagcagagggaggcacgagcaggagccacctgcacactcaatgaggagctgaacagggatcaattacctttttttttagttattaggatgctgctagctgagaatctgccttgccttgattaccccaatgtctggtgcccaagtcccttgagtcctccagcaggaactcctgtggcatcactcaggagtctagtctaagaagctagctctgaccagggcagtggtggccaggcttctgtgagtgggccagcctcccccgggtaggacacaagccataccagcagggctgtatgtgaactgtggaaaatagagagcaaagtgggtaggtgggtgtagggtgctgttttcctggaaatatctacctaatctcgctcttctcttacctctaggtgtttgtaaattttgctaaacagcagactgaaagtcatgacctccctctgcaccctcgagctgctggagccagtcgacaagcccaggtacccctgctgcttatgcagtccacagcttgaggcagttccttggctcagagcccagctggttcactgggcttgagttgctccaaggctcagatatgcctcctacagagagccccacccacaccacggtccctaccaagtccccaccacatcctcatcacatccttgctaagtccctgccactgtgtgttctgtgctgaagaacttttcattcagtagttgtaggggttcctattgtaatcaggaaaccatctggatagcatgggagagcatttttgaaaagaactttcccatgtttttgcttacagcaaaaaagcttggatttggggaataaggagcagagaaggtaatagagaatattagaatgttttgggtgcttgacatctatgtctggacatgtgtttgagtttcaagggaagggacttaactggcacatcatttcagtgtcagacacatttggttagatcaaggaatagcatctgttgtaggaagagggctctttgttctttataaaaattacaagaagatggagaaagaagcaataggaggtatgtctcctggcttgtgataactcttggaataggtgcttgtaggttcctgccctggcacagtgccccatgtaaggagcacaccacccaagaaggagagagctagagcaagtactggaggaggcaccagcatcccaatgccttggcttaagcctgggattgtagagggatgaattagccactctcttctgacttacctggagagtaaatcaaatcaaatcaagaagcaaggatatgcaaaaaccttatttccccataaagtttttattctgcccagtttctggattgcaagaaaaaccaaatacagctaatgattgaaacactgctgtctaaagcagtgcttgtgatgaattttttcccttcctcttgaccagcagagacctaatggctacttggcaaaactgactttgtcttcccaccccttacctgccagagggcccagaaatgcctaaggctcctttagttacagaaagtttgcttttactgagatcttccagccactgattcccatttatagatctggtgattgctgttgacatcagttgaaaattatttttaaaaaccacttgcagttgcaaatcctttttataactctgtaactcagaatatagaattgggtagcaaaattgtttcccagaattaccaatggtctccccacccctgcctggcatgttccctcttaaaggactaatcccaccacatcacctctgggccaggcagaacatcaggggtgctgatgttctgtgatctacagcagttaattccaaacttttctcccttattggatgagatcatttttctattgtgttttttacatttttgttcacaaagattagaaaacctgcaacacacttattggcatatttttctgataattttcatccaaaacctaattctgactttacaacatactatctttacaaaggtttgcaaaaattctttcatatagcattgtatatgtctgtcatgaaataatagtaagtatattattgtttacattataccacttcaaaataatttcctttaaagtattcttcaaacaagaaaaaggcaatttctctcaagaagttttagagagaatttacaacttgctcctaagcaaatgtgagaacttcaggaggttcatctggccattggctttacaactccaaattgtgagccaggaccacacagatatttctctagaaatcagcgtttgcttaccaagaacatttttactctccaaaggactccatcctggaaaacatgttttgggataaggtcttatgcaatcttatactctgttattaaaaccagtgagggtcaaggtgttaatagattaagtagtgacagatgatcagacaacttagaaacatcctaaataggttaataattatgtgaccatcgcatgtgcattcccaaattaggaacaactcagatcaatttctaatccttattcttacactgttccagttcccccatataactcgtatctttgtgttagtttcagaagtttctgaagtaccctcagccttgatggggatcctcgcaccacctcaaatcctgttctcagccctaagaactgtgttagtcatcctcttaagaggatgtgtgattttaaatcagataatgggataaaccacatttcgtctagactggtcaggcctttgtccagtcccctcctcgcccacactaccccagctccacagcgggcattggttcaggaattcaacccacactttataactggagacagtatctctccagttaaaaaggtcaccttggtgtccgcttctcaaggaacatggacatctttattaatcaaagcccaagctttgatctggagcctaatatcctgcactccagctctcatctctcccctcccccagtcacactttcatgcttcccagagccacccctacaggaagtggtcaagggaattctatacctcagggctgacctaaattaggatttcttggcttttaagataatggtaactttcttaagctaaaaaagccccaaaagaccctgtaagagcccttggaaacagcaccatgggtgtagcttccccccaggatgtaagcatgtatgcacacatctcgtatgtgtgtctttgtaacaaatgcctggatcttagtaccagggagacctgattcatagatttcatagagaaggagagaaagatggcccataacctgggtgatctgacagaatcacagtgccctcagctgagtgcccttcagaaattgattgacaactgtttagcttttgaaatctaaaagtagtacagcatctcagaaaaccaagatgacgcgagtccatgtgatctccttccacaggactgatctttcacaccgctcgttcctgcagccagaaaggaactctgggcagctggaggcgcaggagcctgtgcccatatggtcatccaaatggactggccagcgtaaatgaccccactgcagcagaaaacaaacacacgaggagcatgcagcgaattcagaaagaggtctttcagaaggaaaccgaaactgacttgctcacctggaacacctgatggtgaaaccaaacaaatacaaaatccttctccagaccccagaactagaaaccccgggccatcccactagcagctttggcctccatattgctctcatttcaagcagatctgcttttctgcatgtttgtctgtgtgtctgcgttgtgtgtgattttcatggaaaaataaaatgcaaatgcactcatcacaaacta

SEQ ID NO: 3 - DNA, 11468 bp, Homo sapiens
  source 1..11468: mol_type = genomic DNA
tgctcagtcctccaggcgtcggtactcagcggtgttggaacttcgttgcttgcttgcctgtgcgcgcgtgcgcggacatggcctcaaacggtaggtaagggcgcgaggcgacggcggcggcgcacccggccgaggcctcccagctgggcttttcgttttcagtgggaccggggcggcgatcccgtgtgggattttttggcgcccctgtggcgggaagccgcggagaagagtaactggaggaggctggtgtcgccattttgtttcgctcctctggccctcgcgcgcggggcgggaagtcttttctttgcagtccgtttgcttggggtgggcgttgggagggacgcttcttaggggtttgaagcgtcaggtgagggtggaaaacgcccattctccgtggcctcgcctcccccaactcccggccccgcgctcgagcccgctttgtcgcagtgctgcatccgggcactcgcggcgcgcacgcgctctgcgggcccctcccccttcgcggcgcgggtaccccttccccgcctcgtgttggttcagctttctgtcgcgagacccttcgcggaagactcggcggcgcgcgtccggtgtgagccttgtccctcagtggtccttcgcgaatgggcgggatcgctccgttcccgcctgggttgccacgcggctgggggcggaggctcgggatcggggccgccctctagcttaacggtttggcggcggtggtcagggttcgaccaacggacttggggacggcccgagagtttttcccgcctaaatttctttctttttttttttggagacacggtcttcctctgtcgcccaggctggagtgcagtggtgcgatctcagatcactgcaacgtccacctcctgggttcaagtgattcttctgcctcagcctcctgagtagttgggattataggcgcccgccaccacagcccggctaatttttgtgtttcttagtaggggcggggtttcaccatgttggtcaggctggtctcgaactgctgacctcaggtgatccgcccgcctgggcctcccgaagtgtcgggattacagacgtaagccaaccacgcctggtctaaatttcttttttctgagatagggacggagaagaacggccgcccgaggccacaccctctcctggtcctctttcccttttcctgcgggggaagcgccgcgtttcctgtgctgggaggatgagttgatcttgttcgtgtatcttaagtggggcttttcaaaagcgcttttgttgctttttgttcgctgggggaaggcagggtaggtgagaaaacggaaccatctggagtcccagggctggggactcgagtacctgttgactttcgcctcctaaggcgagcagttgcatgatctctgtcatttggggtccaagggctcttttgattctctggctttgcactaaaaagcccacttcatctccgggattggtcaaagagtgaagaatggccttttttgagactttcttattctgtgggtctgggctgagagagcagaggccacaatctgaacactgttcgaattcaaacctgtgccactttggtagttctgcgacgttgggagagttagtctcttgactcctggcgataatggctttctcatagagtggatgaaacgaatgcgcgatgttttagagcaatcactgacatgaattgggcttgcagaaaattgtggatgtccaccaagaccttggtttttccaatggttaaggcttctgggactctgtagaaacttgcattttcttcactttttctttattgtaagaacacttggctgataacgccagtttgttcctcttctcaaccagtgtctcatggaggaattttatgccctttgttgcaacatggtcctatttttatttttttttttgagatggagtcttgctctgttgccaggctggagtgcaatggctcactgcaacctctgcctcccgggttcaagcgattctcctgcttcacctcccgagtagctgggattacaggcgtgcgccaccatgcccggctaattttttgtatttttattagagatggggcttcaccatgttggtcaggccagtctcgaattcctgacctcaagtgatccacccacctcggcctcccaaactgctgggattacaggcatgatccaccgtgcctggcctacgtggtcctttttattcatcagtgcttgagttaaggaatttagctttaattcaactctttcagagtggcagctgaagataatgtgattgtatttttcttttgcagattatacccaacaagcaacccaaaggtgagtgctatttttgggcttccagagtttgtagagggcaagggtggtcacgccatgttttctgatcacgctggttttccttttatttagctatggggcctaccccacccagcccgggcagggctattcccagcagagcagtcagccctacggacagcagagttacagtggttatagccagtccacggacacttcaggctatggccagagcagctattcttcttatggccagagccagaacagtgagtctttctcagcgggtcacctcttcctactctttctgaatattgcttttctttttcttgttttttggagacggagtctggtcctgttgcccaggctggagtgcagtggtgctgtctcagctcactgcaacatcagcctaccgggttcaaacgattctcctgcctcagcctcctgagtagctgggattacaggtacctgctaccacgcctggctaattttgtgtttttagtagagatggggtttcaccgtgttggacaggctggtctggaactcctgacctcctgcctgccttgacctgccaaagtgctgggattacaggcgtcagccacaatgccctgaatgttgcttttcttaaacctgagcagcactgagatgttgaaactgttccatatttcttttccgtgaaacagtgtataagtcttaaaactttttgggatctgagtcctttacagggcattgtggcacacctgtagtcccagctactgaggaggctgaggcgggaggatcccttgaattcaggagtttggggctgcagtgagctatgatggtgcctgtgaacagccactgcattccagcctgggcagtgtgttgaggccccatctcaaaaacataaaaaaaaaaacaaaaaacaaaaatgtttattggtttgtgattctgtttccatttattttctttggcttttaatttttttgactcttcttattttccatcagcatgaaagagagcatattttctaaaggaagaaccagttttaggccaattctgaaatggagaaaatggttttgtttgaaaatgtatgaaatcatgtgatacataaggaggtgggatttgccccaaggtcctgaagtgtaactaagaaaggtggttgtcctgtagatactgcacgcacagctgcatattacagtgctgttaacagggatccttgggcctgggtttagagggtggtgctggagatggtgttgggattggcggggtgaaattggaactgtactaaagagttggtagaagttgaagcattaaatttaggctttgaaaggagggtaactatctttgcctatgagttgcaacatcactaacagcttctgagaggctggctttatgagtataggtattatgttttctttaacccattccttacattttctctttcctggtggcttttgtgactccctttttcttatcctggtagcaggctatggaactcagtcaactccccagggatatggctcgactggcggctatggcagtagccagagctcccaatcgtcttacgggcagcagtcctcctaccctggctatggccagcagccagctcccagcagcacctcgggaaggtacggtggtgttgatgtcggggaaggcttgaaaagaggggtgaattgatgaggaatgataaagggaccagcagtaggagcagttcagaggtgtaattggggtaggggagcctgtgttgggtacagagaatggactccactaaaagtgaaaggaaattgggggctatgctgggattgtgattgtgttttttgtttgttttccctagttacggtagcagttctcagagcagcagctatgggcagccccagagtgggagctacagccagcagcctagctatggtggacagcagcaaagctatggacagcagcaaagctataatccccctcagggctatggacagcagaaccagtacaacagcagcagtggtggtggaggtggaggtggaggtggaggtgagatgtcttcagctttgtctgcagcccattttctttttctttttttttttttttttgagacggagtcttgctctgtctctgttgctgaggctggagtgcagtggcacaatctcggctcactgcaagctccgccttccgggttcgcgccagtctcctgcctcagcctcccgagtagctgggactacaggcatccgccaccacgcccggctaattttttgtatttttagtagagacggggtttcaccatgttagccaggatggtttcgatctcctgaccttgtgatccgcccgccttggcctcccaaagtgctgggattacaggcgtgagccactgtgcctggtgtctgcagcccattttctataaggatttgtattctcctgttttagcttaaaagagggttcctgtcttgtttcctagctgtctttttactttcttttgtccttcattgcctggcacttgtcaaaccttttcaaaccttttagtgctactttacaatctttttgttttttttttttaatcattctttcttttctcacaggtaactatggccaagatcaatcctccatgagtagtggtggtggcagtggtggcggttatggcaatcaagaccagagtggtggaggtggcagcggtggctatggacagcaggaccgtggaggccgcggcaggggtggcagtggtggcggcggcggcggcggcggtggtggttacaaccgcagcagtggtggctatgaacccagaggtcgtggaggtggccgtggaggcagaggtggcatggggtaggtgtctcatgagccagggagtatctttggtggggagtgtggaggattgcatgaatctccctgaagccagtccctagtgcatggtttagtattcttgttgtctagggatctgtgagggctttgatttgggggcagtgactttctttttacatccccattttatttttgtgagaacttgggagcctgaactcccatccataccactgaatagagattttgagtaatgatacttgtttccaaaaaaaaagaaaccatacatagatacgtatggattggagtcattaatatcctaggcaagaaacatggaagtgaagacttctttctctgcaagggaaaccgatgatcccactcctgggaaatagtagggaaacttggtatgtgtattcccatgtgtcctctagggagttggtaatggttaacctgacttcagcttccaggaattggctactcttcccgttttctatagtcatttgaatccacgagcttgatttgcactaatttgaccgacattgattttgtgtgtgacttggtttatggggccagctgactgaagtaagcagaccttttgggcaaaaatatgctttgacagtggtctcccacctatttgttccactgtctgccttcccctggttacttaaaattcatcagcttgtccaactggaccttctttccttcctgctgaagttgatttgaagtaaaaccttagatttgatgttaaaacagttgtcaaatctgttggtaaataagatttgaaggaccctactctgtctcccttgaaaaaggggaggaatgtcagtgttactgtttttggaaaaagtagatttttaaaccgagtttggaaatggtaagtatgcagaggtgggtgggggcaatctcaaaaacgtgcaaaaatgaggaaaacaaaaatgaggaaatgtgtgcgtgtgtttaatgcaaaactttaaaaagaaaaacaactgttatgtgactgttaacttgctctgcattttatgtgccacaggtatgaaaggtgacattgcaaaatactccgctcttctcgcagtgtagaaggggtgaccccgggggttgggggagatcaaaaacagctcagtagttaggacagagcttagctaagtttgtcttgctttaaggggaagttgcctttggttttgactttttatggaatggggttgggtctgcttgctgctttcaaagcaaaaaccacaaaaatgtgttcaaggctaccccagcctggtgtgaaatgtcttctgggtaaattggggtagggtttttaaaccaactacttggttgtcaaccacttgcgacaagaggaaaaaaaaacatctgctccatcggaagaacgaccaaggaaaatgggttattttttttccagaggaaatagataacgtaaccttttaaagcaaaatctttataaactgtgtctgagaaattgcacacgtgtgtgtgacatgctcaaaggtcagacaaggggtggtcaggaagggatgtattttagtagccacttgtatctttttccaaaaacacctacccatgtttggggaatgttaaacaaaatcaaaaaacaaccttttgtagccgttggaagcttcatgtcctttcttctaacttgtcttctccagcggaagtgaccgtggtggcttcaataaatttggtggtaagtgaacagagtttccaaaattcccaactcccagcaatgctttgtctgattgttcatttgcagatgtcttagcgtgttaatttaaatgtcaaaggttttgaggtgtccagaaccacctccagaaaggggtagggtagaatgccacctgttgcctggtgtgtgctaacctggagcaggtaggggtaagactcaatagtcatcttttaccaaatgggtttgccccaggttaataagaggggtctagtaggccttggactgggccgttgccacacctggcacttagtgaccatcatcatgagaaactggagagtgcgtgctggaacacgtggtgccatcttggctttaggatccttttgatcgttgtgtccaaggcttgtgtgtgtgtgagtgtgtgggagacaactccgaatgtttaattctggaagagggatgtaacattgccctgaggatggtgaagttggtatacatttataaagtacggaatggtgtcaatgaatgcaattctatgtatatggacttaactgagatgggcaaatagaaactagctctgggaaggaacatgtgcactacttcaagaaagattggaagcatgtgtggctcatgggaaataaccaggtcttaaacagcacaaactgaattcgtggaccaggaaggtcttaaacagcacaaactgaattcatggaaaaatgacaaatttgagaagtctcccagtaagctggaacttttctggtttggttaacaaaaggtttcttgatttgtttcaagatttaaagccaaaggtgtgggttcatgacttaggtgtcattgcgtgtgggtacaatatttatatatggcgaattcagataaacattggtcaaagatggtctctggaaaaacaaaatagaggctgcattacggaaataagatttctggtctgttccctgggacatgcttaaaaaatacaatagctattatgtatggtttttattttcatgtggtttcggggaaacaacacggttttaaggatggtttctaaagatgaaattaaaaattgttccacaagggttaagtgtctggtggtaaagttgggagaaactggatggatgcacatcgcatggctggtggcgagcccatctctcttctctcgggtgagagaaccgggccaagctgagttggtttgttcactttaatgggtctccgtttcccctgccacctgtgctgaggacatttcccagcctgagctgggggaggcagcatttgctgaagtgtggagttgtctctgtggagactcaagttacagatcttaaggggcctgcctagaattttctcctctgggcaggcgacccaggaaagggtttggagtgaggctgtgagcacttacttgatattttacaagtttggatttggtgttaatttttttccttgtccgttttttcctgttgactaacggctcatcttttccttgtttttgttttttttttgttctttttttccatgtcactaaaggccctcgggaccaaggatcacgtcatgactccggtgagttcacacgtggtggcatgaaaagagtggctaaagtggtatcaagactgcctggatgttctttgaaactattataaaaaggaaactgaaaaaaatggggatagagaaggaagggagttaggtgtgtccttagttagcagtgagaagtatttgttacgaagtatttctcagaaatacctggcttgtgggttccacccccagtgatttaggtctgagaggaccctgaaaatctacctttctaacaagtccccagtgatgctgatgcgtctggaccacactcagatggtttacagcagtggttctttcaaaatgtggatcatgtccaagttggtgaacaaaactagtgaaagacctgaccacatgaagtaaagcattgaactcctgtttaggttgtattgatgtttgtgtactagatttgaatgtaaaatgggtttcttatttaattcggggaccttcaactgaaagttgataaatactgatggacttttctgtgtggtcttgttgggcatttcactcctgagccctggtttccatactgtatactgggtgttaacatgtttcaaaggataattgtcaaactgaatctgaaatttatcagcatggctggcatatagggactcaaaagggatgtggatttctttttagttgtcttccataaaccaaatgataccagttgcttgatggatactaggtgctttaggttttttcctgtgttttttattttaccttttcacatttgcattttctctgttcaacaagcagaacaggataattcagacaacaacaccatctttgtgcaaggcctgggtgagaatgttacaattgagtctgtggctgattacttcaagcagattggtattattaaggtacttgtggagaggagtgggagctttctgtcagtgttgtaggcttgtggatttcacacattagtaaaagcaagtctttaatggttgccagcagtaaaaacaagtcttagtggttgttgccagcttaatttgttgaggaaagagccttagttactgttttctaaaagagaagttctatcttaacacaaaaagtataacttatcagagtaccctaaactcttgagatttgtactctatagtaacttttagttttatctttcaatattggagtgagagacagttttctttaatggaggtttacatgtgaggtaggaagaagtaactgggaagaggggagctgaagtttgggaattataaacctcatgttctagaggaagaagatggaaagggagtactgtagcctttaaaattgatgttacctcattttgctttcttcagacaaacaagaaaacgggacagcccatgattaatttgtacacagacagggaaactggcaagctgaagggagaggcaacggtctcttttgatgacccaccttcagctaaagcagctattgactggtttgatggtatgtatgagaaggctggcagaggtggggctggggatatagggcagcaagccttaggaaacaagccatagtttgagggttcttttgagtcttccaacacttactttagctgcggtttcaggtagtctcatttttgcttatgtgtcagcagattataaaccatttgagaaaggcacgcttctcttgtattttcggattaatgtgtcttgcatttaaagtctgttgatgattttttgtttctctaggtaaagaattctccggaaatcctatcaaggtctcatttgctactcgccgggcagactttaatcggggtggtggcaatggtcgtggaggccgagggcgaggaggtgaggagctacctgctagtggtgcagaggggtaatggggagagtgcagaagatggtaaaggcttgcatggaatgggttagatttaccaaacttggagagggagcagacccatacttggtctatctgcattaggacccatgggccgtggaggctatggaggtggtggcagtggtggtggtggccgaggaggatttcccagtggaggtggtggcggtggaggacagcagcgagctggtgactggaagtgtcctaatccgtgagtgaaacttaatttttttcttagttctcttgcatgcgtgctctttgatatattggtactgaggtatgtgcgtgttttccaaagaagtaaatgtcaaggccacactgttggggtcagatttagccaaaagcttacctaggtaaggttgatgtaatgggaaaggtaatggattgggttcagtaatactgatttttgttcctgactctgagaagcaagccgttttgtctttctgaagcttcagtttcctcactgtatctctaaagtcaccgtagtttcttcctagttctaggtcttgcctattccccatcgctccagactgattgtcttcctttctccttagcacctgtgagaatatgaacttctcttggaggaatgaatgcaaccagtgtaaggcccctaaaccagatggcccaggagggggaccaggtggctctcacatgggtaagaaaggcagacctggtgctagggagctgggaccaaagaatccttaatttttcagcggggaggctcggggaacataggggaatgggaatatgatagatcttgtttcttttgtcctagggggtaactacggggatgatcgtcgtggtggcagaggaggctatgatcgaggcggctaccggggccgcggcggggaccgtggaggcttccgagggggccggggtggtggggacagaggtggctttggccctggcaagatggattccaggtaagactttaaatcagaataaaaaagtagagcagttgaacagaggccataggataacagggttttgttgagaaagtggtttcattttgagggctaggtggaaagacctgaggttgtaaccagtagtggagagggaaggaaaattaactcagggggagtgaatctgtagacccacttgagataagatactcgctgggttaggtaggaggggcagataggatatctaggcttggagaggctggtaactcaaatataatggatacttaatttttttttttttttttgcaggggtgagcacagacaggatcgcagggagaggccgtattaattagcctggctccccaggttctggaacagctttttgtcctgtacccagtgttaccctcgttattttgtaaccttccaattcctgatcacccaagggtttttttgtgtcggactatgtaattgtaactatacctctggttcccattaaaagtgaccattttagttaaa

SEQ ID NO: 4 - DNA, 9881 bp, Homo sapiens
  source 1..9881: mol_type = genomic DNA
cacccagaggctgatgctcaccatggggcgcctgcaactggttgtgttgggcctcacctgctgctgggcagtggcgagtgccgcgaaggtaagagcccagcagaggggcaggtcctgctgctctctcgctcaatcagatctggaaacttcgggccaggctgagaaagagcccagcacagccccgcagcagatcccgggcactcacgctcatttctatggggacaggtgccaggtagaacacaggatgcccaattccatttgaatttcagataaactgccaagaactgctgtgtaagtatgtcccatgcaatatttgaaacaaatttctatgggccgggcgcagtggctcacacctgcaatcccaccagtttgggaggccgaggtgggtggatcacttgaggtcaggagttggagaccagcctggccaacatggtgaaaccccgtctctactaaaaatacaaatattaatcgggcgtggtggtgggtgcctgtaatcccagctactcgggaggctgaggcaggagaaccgcttgaagctgggaggtggagattgcggtgagctgagatcacgctactgcactccagcctgggtgacagggcgagactctgtctcaaaaaatagaaaaagaaaaaaatgaaacatactaaaaaacaattcactgtttacctgaaattcaaatgtaactgggcctcttgaatttacatttgctaatcctggtgattccacctctctgttgttcccattttacagaaggggaaacgggcccaggggcagggagtgtggagagcaggcagacgggtggagagaagcaggcaggcagtttgcccagcatggcacagctgctgcctcctattcctgtgcaggaagctgaaagccgagctactccacacccgggtccgggtccctccagaaagagagccggcaggcaggagctctctcgaggcatccataaattctaccctctctgcctgtgaaggagaagccacagaaaccccaagccccacaggaagccggtgtcggtgcccggcccagtccctgcccccagcaggagtcacacaggggaccccagatcccaaccacgctgttctgccgcctgcggtgtctcaggccctggggactcctgtctccacctctgctgcctgctctccacactccctggccctgggaccgggaggtttgggcagtggtcctgggctcctgactcaaaggagaggtcaccttcttcttgggcgagctcttcttggggtgctgagaggccttcggcaggtcatcacgacccctccccatttccccaccctgaggccctctggccagtctcaattgcacagggatcacgccactggcacaaggagacacagatgcctcgcaggggatgcccacgatgcctgcatgtgttgcttctggttcctttcctccagttccaaccgccgcactctcccacaccagtgtgacagggggcccatcaccctagacttcagagggctgctgggaccctggctgggcctgggggtgtagggccaccctgcccttccccacctggaacctggcacaggtgacagccagcaagcaatgacctggtcccaccatgcaccacgggaagagggagctgctgcccaagatggacaggaggtggcactggggcagacagctgcttctcaacagggtgacttcaagcccaaaagctgcccagcctcagttccgtcagggacagagggtggatgagcaccaacctccaggcccctcgtgggggtggacagcttggtgcacagaggccattttcatggcacagggaagcgtggcgggggtgggaggtgtggtccctagggggttctttaccagcagggggctcaggaactgtggggacttgggcatggggccatcgactttgtgcccagccagctaggccctgtgcagggagatgggaggagggaaaagcaggccccacccctcagaaaggaggaaggttggtgtgaaacatcccgggtacactgagcattgggtacactcctcccgggagctggacaggcctcccatgtgatggcaaacaggccgacaggagacacggctgttgctcgtcttccacatggggaaactgaggatcggagtcaaagctgggcggccatagccagaacccaaacctccatcccacctcttggccggcttccctagtgggaacactggttgaaccagtttcctctaagattctgggagcaggacacccccagggataaggagaggaacaggaatcctaaagccctgagcattgcagggcagggggtgctgcctgggtctcctgtgcagagctgtcctgctttgaagctgtctttgcctctgggcacgcggagtcggcttgccttgccccctccggattcaggccgatggggcttgagcccccctgaccctgcccgtgtctccctcgcagctgggcgccgtgtacacagaaggtgggttcgtggaaggcgtcaataagaagctcggcctcctgggtgactctgtggacatcttcaagggcatccccttcgcagctcccaccaaggccctggaaaatcctcagccacatcctggctggcaaggtgggagtgggtggtgccggactggccctgcggcggggcgggtgagggcggctgccttcctcatgccaactcctgccacctgcagggaccctgaaggccaagaacttcaagaagagatgcctgcaggccaccatcacccaggacagcacctacggggatgaagactgcctgtacctcaacatttgggtgccccagggcaggaagcaaggtctgcctcccctctactccccaagggaccctcccatgcagccactgccccgggtctactcctggcttgagtctgggggctgcaaagctgaacttccatgaaatcccacagaggcggggaggggagcgcccactgccgttgcccagcctggggcagggcagcgccttggagcacctccctgtcttggccccaggcacctgctgcacagggacaggggaccggctggagacagggccaggcggggcgtctggggtcaccagccgctcccccatctcagtctcccgggacctgcccgttatgatctggatctatggaggcgccttcctcatggggtccggccatggggccaacttcctcaacaactacctgtatgacggcgaggagatcgccacacgcggaaacgtcatcgtggtcaccttcaactaccgtgtcggcccccttgggttcctcagcactggggacgccaatctgccaggtgcgtgggtgccttcggccctgaggtggggcgaccagcatgctgagcccagcagggagattttcctcagcacccctcaccccaaacaaccagtggcggttcacagaaagacccggaagctggagtagaatcatgagatgcaggaggcccttggtagctgtagtaaaataaaagatgctgcagaggccgggagagatggctcacgcctgtaatcccagcactttaggaggcccacacaggtgggtcacttgagcgcagaagttcaagaccagcctgaaaatcactgggagacccccatctctacacaaaaattaaaaattagctggggactgggcgcggcggctcacccctgtaatcccagcacgttgggagcccaaggtgggtagatcacctgaggtcaggagtttgagaccagcctgactaaaatggagaaacctcttctctactaaaaatacaaaattagccaggcgtggtggcgcttgcctgtaatcccagctactcgggaggctgaggcaggagaatcgcttgaactcaggaggcggaggttgcggtgagccgagatcatgccactgcactccagcctggagaacaagagtaaaactctgtctcaaaaaaaaaaaaaaaaaaaaaaatagccaggcgtggtatctcatgcctctgtcctcagctacctgggaggcagaggtggaaggatcgcttgagcccaggggttcaaagctgcagtgagccgtggtcgtgccactgcactccagcctgggcgacagagtgaggccccatctcaaaaataagaggctgtgggacagacagacaggcagacaggctgaggctcagagagaaaccaggagagcagagctgagtgagagacagagaacaataccttgaggcagagacagctgtggacacagaagtggcaggacacagacaggagggactggggcaggggcaggagaggtgcatgggcctgaccatcctgcccccgacaaacaccaccccctccagcaccacaccaacccaacctcctggggacccaccccatacagcaccgcacccgactcagcctcctggggacccacccactccagcaaccaacgtgacctagtctcctggggacccaccccctccagcaccctacccgacccagcttcttagggacccaccatttgccaactggggctctgccatggccccaactctgttgagggcatttccaccccacctatgctgatctcccctcctggaggccaggcctgggccactggtctctagcaccccctcccctgccctgcccccaggtaactatggccttcgggatcagcacatggccattgcttgggtgaagaggaatatcgcggccttcgggggggaccccaacaacatcacgctcttcggggagtctgctggaggtgccagcgtctctctgcaggtctcgggatccctgtggggagggcctgccccacaggttgagaggaagctcaaacgggaaggggagggtgggaggaggagcgtggagctggggctgtggtgctggggtgtccttgtcccagcgtggggtgggcagagtggggagcggccttggtgacgggatttctgggtcccgtagaccctctccccctacaacaagggcctcatccggcgagccatcagccagagcggcgtggccctgagtccctgggtcatccagaaaaacccactcttctgggccaaaaaggtaaacggaggagggcagggctgggcggggtgggggctgtccacatttccgttctttatcctggaccccatccttgccttcaaatggttctgagccctgagctccggcctcacctacctgctggccttggttctgcccccaggtggctgagaaggtgggttgccctgtgggtgatgccgccaggatggcccagtgtctgaaggttactgatccccgagccctgacgctggcctataaggtgccgctggcaggcctggagtgtgagtagctgctcgggttggcccatggggtctcgaggtgggggttgaggggggtactgccagggagtactccggaggagagaggaaggtgccagagctgcggtcttgtcctgtcaccaactagctggtgtctcccctcgaaggccccagctgtaagggagagggggtgccgtttcttctttttttttgagatggagtctcactgttgcccaggctggagtgcagtgtcacgatctcagctcactgcaacctccacctcctgggttcaagtgattctctgactcaacctcccatgtagctgggactacaggcacatgccaccatgcccagataatttttctgtgtgtttagtagggatggagtttcatcgtgttagctaggatgatctcggtcttgggacctcatgatctgcccacctcggcctcccaaagtgctggaattacaggcgtgagccactgtgcccggccccttctttattcttatctcccatgagttacagactcccctttgagaagctgatgaacatttggggccccctcccccacctcatgcattcatatgcagtcatttgcatataattttagggagactcatagacctcagaccaagagcctttgtgctagatgaccgttcattcattcgttcattcattcagcaaacatttactgaaccgtagcactggggcccagcctccagctccactattctgtaccccgggaaggcctggggacccattccacaaacacctctgcatgtcagccttaccagcttgctacgctaaggctgtccctcactcattcttctatggcaacatgccatgaagccaagtcatctgcacgtttacctgacatgagctcaactgcacgggctggacaagcccaaacaaagcaacccccacggccccgctagaagcaaaacctgctgtgctgggcccagtgacagccaggccccgcctgcctcagcagccactgggtcctctaggggcccgtccaggggtctggagtacaatgcagacctcccaccatttttggctgatggactggaacccagccctgagagagggagctccttctccatcagttccctcagtggcttctaagtttcctccttcctgcttcaggcccagcaaagagagagaggagagggaggggctgccgctgaagaggacagatctggccctagacagtgactctcagcctggggacgtgtggcagggcctggagacatctgtgattgtcacagctggggagggggtgctcctggcacctcgtgggtcgaggccggggatgctctaaacatcctacagggcacaggatgcccctgatggtgcagaatcaaccctgccccaagtgtccatagatcagagaagggaggacatagccaattccagccctgagaggcaaggggcggctcaggggaaactgggaggtacaagaacctgctaacctgctggctctcccacccagaccccatgctgcactatgtgggcttcgtccctgtcattgatggagacttcatccccgctgacccgatcaacctgtacgccaacgccgccgacatcgactatatagcaggcaccaacaacatggacggccacatcttcgccagcatcgacatgcctgccatcaacaagggcaacaagaaagtcacggagtaagcagggggcacaggactcaggggcgacccgtgcgggagggccgccgggaaagcactggcgagggggccagcctggaggaggaaggcattgagtggaggactgggagtgaggaagttagcaccggtcggggtgagtatgcacacaccttcctgttggcacaggctgagtgtcagtgcctacttgattcccccagggaggacttctacaagctggtcagtgagttcacaatcaccaaggggctcagaggcgccaagacgacctttgatgtctacaccgagtcctgggcccaggacccatcccaggagaataagaagaagactgtggtggactttgagaccgatgtcctcttcctggtgcccaccgagattgccctagcccagcacagagccaatgccaagtgaggatctgggcagcgggtggctcctgggggccttcctggggtgctgcaccttccagccgaggcctcgctgtgggtggctctcaggtgtctgggttgtctgggaaagtggtgcttgagtccccacctgtgcctgcctgatccactttgctgaggcctggcaagacttgagggcctctttttacctcccagcctacagggctttacaaaccctatgatcctctgccctgctcagccctgcaccccatggtccttcccactggagagttcttgagctaccttccatcccccatgctgtgtgcactgagagaacactggacaatagtttctatccactgactcttatgggcctcaactttgcccataatttcagcccaccaccacattaaaaatcttcatgtaataatagccaattataataaaaaataaggccagacacagtagctcatgcctgtaatcccagcacattgggaggtcaaggtgggaggatcacttgaggtcaggagtctgagactagtctggccaacatggcaaaaccccatctctactaaaaatacaaaaattatccaggcatggtggtgcatgcctataatcctagctactcaggaggctgaggtagcagaattgattgacccagggaggtggaggttgcagtgagccgagattacgccactgcactccagcaggggcaacagagtgagactgtgtctcgaataaataagtaaataaataataaaaataaaaaataagttaggaatacgaaaaagataggaagataaaagtatacctagaagtctaggatgaaagctttgcagcaactaagcagtacatttagctgtgagcctcctttcagtcaaggcaaaaagggaaacagttgagggcctataccttgtccaatctaattgaagaatgcacattcacttggagagcaaaatatttcttgatactgaattctagaaggaaggtgcctcacaatgttttgtggaggtgaagtataaattcagctgaaattgtggaacccatgaatccatgaatttggttctcagctttcccttccctgggtgtaagaagccccatctcttcatgtgaattccccagacacttccctgcccactgcccgggacctccctccaagtccggtctctgggctgatcggtccccagtgagcaccctgcctacttgggtggtctctcccctccaggagtgccaagacctacgcctacctgttttcccatccctctcggatgcccgtctaccccaaatgggtgggggccgaccatgcagatgacattcagtacgttttcgggaagcccttcgccacccccacgggctaccggccccaagacaggacagtctctaaggccatgatcgcctactggaccaactttgccaaaacagggtaagacgtgggttgagtgcagggcggagggccacagccgagaagggcctcccaccacgaggccttgttccctcatttgccagtggagggactttgggcaagtcacttaacctccccctgcatcggaatccatgtgtgtttgaggatgagagttactggcagagccccaagcccatgcacgtgcacagccagtgcccagtatgcagtgaggggcatggtgcccagggccagctcagagggcggggatggctcaggcgtgcaggtggagagcagggcttcagccccctgggagtccccagcccctgcacagcctcttctcactctgcagggaccccaacatgggcgactcggctgtgcccacacactgggaaccctacactacggaaaacagcggctacctggagatcaccaagaagatgggcagcagctccatgaagcggagcctgagaaccaacttcctgcgctactggaccctcacctatctggcgctgcccacagtgaccgaccaggaggccacccctgtgccccccacaggggactccgaggccactcccgtgccccccacgggtgactccgagaccgcccccgtgccgcccacgggtgactccggggccccccccgtgccgcccacgggtgactccggggccccccccgtgccgcccacgggtgactccggggccccccccgtgccgcccacgggtgactccggggccccccccgtgccgcccacgggtgactccggggccccccccgtgccgcccacgggtgactccggggccccccccgtgccgcccacgggtgactccggggccccccccgtgccgcccacgggtgactccggcgccccccccgtgccgcccacgggtgacgccgggcccccccccgtgccgcccacgggtgactccggcgccccccccgtgccgcccacgggtgactccggggccccccccgtgacccccacgggtgactccgagaccgcccccgtgccgcccacgggtgactccggggccccccctgtgccccccacgggtgactctgaggctgcccctgtgccccccacagatgactccaaggaagctcagatgcctgcagtcattaggttttagcgtcccatgagccttggtatcaagaggccacaagagtgggaccccaggggctcccctcccatcttgagctcttcctgaataaagcctcatacccctg

SEQ ID NO: 5 - DNA, 168384 bp, Homo sapiens
  source 1..168384: mol_type = genomic DNA
acagaaggctttctggaggaggcggaatttttatggcggccggatccggctttctctgaacagcgagaaggcgcttagcgccctagggaccaggtaactcctgaggtgagcttcttggtggggatcaagcccagggggcgacggagtccgggctgggggaagggcccgaggggctggagtcgcaagttcaggcccagcttgggctccctgtcccgcccttccgctgtcttgggggattggacgccacgcggtcgtgctagattcggtgctgcgggcccggtgcaggatgcaggccgtgaggccccaggccgagggctgcgccagcgggcttgtcccggccagccgggcggtcccgtgtcccggcgcagctccgctggggtccagatgcccggccctcaggggcgaggcgcgcactccccggggaaccgggctgcggagcaggcggcccgctctgggcggcggtggcacgagagggccatctgcctgggtgccgagaactgcagcgtccgcggtgcgaggcgcggcccgtcccgtcccggcccccagcccggcgcgcacgcacatacccacgccggccggcgcccgctgcccgagcccccgtgccaggcccagaccttgactaggcgcgggaggcggtgcagggactagaggaccccctcccccggcgttcccctcgccccgcccgaggctgcgaggacccctgggctcgggggtggtgagggagcttcgtcccggctgggcccgggctggggactcggcctccctgggcgggggccgcacggctgcaggccgaggtgcggacgcgctgtcaggctgcagcccggctcggtgccgggggtgggctcagcgctggggtcgcctggcttcgttcccccgcggaggccacggccgggcgagcagtgccggggcgggtaacccgacccggctccccagagccgctcaccccgcacggcccggcaaggggagggagagggatggggggagggggaagggaaggggtggtgggtgaggggctgtgggcaccgcagggccgagtccccggcccgtctgcgctgctgtagggcggctgcccgcggcacccgggacgatccagcctctgcctcgcgggcgtcgagcctgagacaggagggagccctggggctgcacaggcttggctcagggaggcagacccgagctgctgcctccattttgtttcctgctcagcttggtctgtggtggtggtggtggtggtggtgtgggtttggggtgcggccgggtagggggttcgcctgcggccgcgtctgctcggggcctgaggcctcgaagaccccagcccaagcccccaggtgagccctgcggcaggaggggggttgccttggcctcgggccgaacccagcgggctgagggcaggtgcccagtggatggggagcctgggctgtaacctaagatggaggccgggactgacgcgggcccgagcagggctggcgggacgatcggacaggcctcagccgcgccaggtgccgcctgggttggggttcgagacgcgtagggtgcgggagccgtgtgcggcccgaggccagcgccgtgccccgaggtaggtgaggggatcggaatgccacccacgacgcccgcaggccccgacactccaaggaggcgcgcgaggcccctggggagcccgcctcaggccccgcccgggcagccgggccggcccgtaggccccggccgcgagcgggcgcgcagggggaggggagggggcggcagcggcagctccgctgattgggcggcgctctcacaagcccgacttcacccgccctgaaccccgaagagtgagagaagggaacgcgcgcgctcggtgggggaaggggtgcgcgcgcactcggggcccagccgcacgcgggccggcgcgaggcgctcggtcgcacgcgcggccgcgggggcgcgcgcggtgggggtgtgaggaggaggaggcggcggcggaataggccggggcaggtcgcgctcgctgccttctcccctgaagagagacgcggggggaggggggtgcggcgagcggccccgctctctccccaccgctccgctcgcaccccagtgtaatgagggtcaccccctccccccagctggcccgggagggggcgcggggcacggtaactagtgcgctggggtgggcggcgggcaggcgcgaggagaagggagggaggagggtggccgggcggggaagatggtggtggccgtaaggtgaggggctcgggggagggccaggcgcgatgcggggttggtggccggcggcgctgcagccgccggcctcctccccctccccctcctccatcactaccagccgggctcaggcctagctggccgggctgccgcgaacttcctcccggcgcggcccgtgccccgccggccgcctgcgaacacctcggcctccgcctcccctcaggtagcaggctgcggggcgcggggccggctgccctcccgcagcaaactttgcttgctgctgaatattgatgagagcgatcggctcggctgggaggtgctgccgcggctgcgggaaggagcgcggcccgggcaggcggcggcggcgtcggcagcagccatgtttttcgagctgtagcagctgctgctaccctgactgggcttcgctggccgcctcggtttctccctctgccgggtccaggcctcttcgccctgcagctgcggatccagcaggcctgcattcaggaaggcgagctctggggtgcagccgcctcggccggctcgcctgcggcctgcgcaccgccgctgcaaaggctccggcgctggctgggcgcagggtgcagcgctattgtgaccgctgcgccctagcgagccaggaaggggggggtacctttttgtgcagggtccaggagcccccctcggaccccgcagccttttgcttttgagagatccagctgctcgacccctggcgagggagggggaggactagtcctgtttgagaattgggaattttgacgggcagaggggttttaattttagttcatcccaagtgtccaccagtctacagaggaggaaaaagagacgggctgtttctatgtagcaggatcggcccagcttcgggaaaatggagttttcagaggctcatcgaggccattttttcatctccagtcgggggaactttttctgcccatggaagtgcagcagaaaggcatagaggccactaggccttgaagtggctgccattttaaagagtcgagtcagatggcctattaactcagattaattgctgtgcttttggattccaggttgatgccggcccaggatggatcagacctgtgaactacccagaagaaattgtctgctgcccttttccaatccagtgaatttagatgcccctgaagacaaggacagccctttcggtaatggtcaatccaatttttctgagccacttaatgggtgtactatgcagttatcgactgtcagtggaacatcccaaaatgcttatggacaagattctccatcttgttacattccactgcggagactacaggatttggcctccatgatcaatgtagagtatttaaatgggtctgctgatggatcagaatcctttcaagaccctgaaaaaagtgattcaagagctcagacgccaattgtttgcacttccttgagtcctggtggtcctacagcacttgctatgaaacaggaaccctcttgtaataactcccctgaactccaggtaaaagtaacaaagactatcaagaatggctttctgcactttgagaattttacttgtgtggacgatgcagatgtagattctgaaatggacccagaacagccagtcacagaggatgagagtatagaggagatctttgaggaaactcagaccaatgccacctgcaattatgagactaaatcagagaatggtgtaaaagtggccatgggaagtgaacaagacagcacaccagagagtagacacggtgcagtcaaatcgccattcttgccattagctcctcagactgaaacacagaaaaataagcaaagaaatgaagtggacggcagcaatgaaaaagcagcccttctcccagcccccttttcactaggagacacaaacattacaatagaagagcaattaaactcaataaatttatcttttcaggatgatccagattccagtaccagtacattaggaaacatgctagaattacctggaacttcatcatcatctacttcacaggaattgccatttgtaagcagtttttggtacaacttaaatatatacatatatgtatatatacaggccacttaaagggaaacttgtaacaaatttgtttttggttgcttatcagttcacagctgaaatcctattgctaatcataagctttgggcaaaattttactttgatttttaaatttatctctgttgtatgaatttggttgttttaagctttttccaaataactcttcattgagagtaggctaatgcttttaaaggcatttgattgagttcaggtttaatttctcaagttggaggtatacatatatgattaaaaaaaaaaaaaaaagatgggttttggcctgccagcaccatgagtgcaggtgaaccaatttagtacttggagtcctgttgctatatgtggcagattatttttttacttgatgacttgactcttacttcaggttgaagggcattttgaacacagattaaagtggctaagatgaagttttcttggacattgtcaaaatctaaattaggctagtttttctgaactacctgttttgaaggtatagcatcctgtgcttttgataactgccaccattagctcttttttttttttttgaggtggagtctcactctgttgccaggctggagtgcagtggttgatcactgcaacctctgcctcttgggttcaagcaattctcctgcctcaccctcccgagtagctgggattactggtacccatcaccacgcccggctaatttttgtatcaccattagctcttgaagtttttctagttttgttttgttttattttattttattttaacagaaccctaactaagacaaagttttatatttatttattgtttagagactggccttgtcatgttgcccaggctggcgtcgggactcctgggctcattcgatcctcctgcatcagctagaactacagtagtttcagattttgaagtgtgtatgtgtatgtgtgatatgtatatattccgtgtgtatagaaatggagagtatcttatttgagttgttgttttcagtaatgctgtcaagtattgttagagggtgataaatgataacatttgtttttatttgagcttatgaagaatttcttgactttctagctaaatgatcagttcacttctcttagcctcaattttattgcgtctaaattccagaagttcttgattgctataagattccttcagctttaaatattaatatttgatattgattttgtttctgcccaaacacattgtttggtcaccgccggtaatgttagcaaagagaattttttttggccaacaaatgtctcataccacattcagtttttataagaaaaacttttatggtatgttgttattctgagttcattaaacattcgctttaccttatatccctgctgttctttaaagttacagagggagaatgtgggtgtgtcacttttgtttctgttgatttgtatcttaattatgccttggtactccttggtttcttggcaattgcagatttaaaaaaatttgctttagtggttatcttgagtctgaattgtcctacacattagggtgggtaggctgttttgaaaacctattggcagctcagacaaatcctttttcttgggttcacgttgaaatttattttatatatatatcgtgtctttgtttttgcacataaatttaaatctgagaatggagatagatgtttctctagaagcatacaaatagaattgtaaacctgtttctcgtcaaagagatgttagtggagtattggttctattaaaaaaaaaatgaaggctgagtgtggtggctcacacctgtagtcccagcactttgggaggctgaggtggacagatcacctgaggtcaggagtttgagaccagtctggccaacatggtgaaactccgtctctacaaaaattagccgggcgtgatggtgggcaactgtaatcccagctactcgagaggctgaggcaggagaatcgcttgaacccaggaggcagaggttgcagtgagccaagattgcgccattgcactccatactgggaaataagagtgaaactctgtctcaaaaaaaaaaacaacaaaaaaacaaacaaacaaacaaacaaaaaactgaaaatattggagcctttagatagtaggttacatgtctaaaatgggagttagcaaatgtataaatgtagaagtttttttttcagggagaaattgaaattgctcaaagactttatcaccttgaagaagcaagtatgtagtttatttatttttttgagacacagtcatgctgtcacccaggctggagtgtagtggcgcgatctcagctcacttcaaccacctcctcctgggttcaagcgattctcccacctcagcctcccgagtagctgggactacaggtgtgcaccaccatgcctgactactttttgtatttttattagagacgaggtttcaccatgtgggccaggctggtcttgaactcctgacctcaggtgatccgcccaccttggcctcccaaagtgctgggattacaggcgtgagccaccgtacccatcccctaatttattattttaggaatttggttcaaagttgtgattgaaatctattgcctttatttttgcctttgatatttttaaactgaagacatttttttttttgagacgaagtttcactcttgttgcccaggctggagtgcaatggcatgatctcggctcactgcaatctccgccttctgggttcaagcagttctcctgcctcagccttctgagtagctgggattacaggtgcgcaccaccaccccagctaatttttgtatttttagtagagatggggttttaccatgttggcccagctggtctcgaactcctgacctcaggtgatccacccgcctcagcctcccaaagtgctgggattacaggtgtgagccacggagcccggcctcagactgaggacttaaaaagtgaggtcagggtgggcatggtggctcacgcctgtaatcccagcactttgggaggctgaggcgggtggatcacctgagatgaggatttcaagaccagcctggccaacatggcaaaaccccgtctctactaaaaatacaaaaaattagctaggcatggtggcaggagcctgtaatctcagctatttgggaggctgaggcaggagaatcacttgaacccgggaggctgaggttgcagtgagctgagatcgccccattgcactctagcctgggcaacaagagcgaaactccctctcaagaaaaaaaaaaaccatcctggccgacatggtgaaaccccgtctctactaaaaatacaaaaattagctgggcgtggtggcaggctcgggaggttgaggcaggagaatcacttgaacccgggaggcggaggttgcagtgagccgagattgtgccactgcactccagccttgagacagagggagactccatctcaaaaaaaaaaaaaaaaagcggtcaatcttagaatgcaaagttaggtaagcaatacagcttgagaaaagtgtaattaaaaataacttttctatgtagtcatgtgatattaatgtattcaacttgttcacagttgatttaagttattgatatagtaggtattgttactatgctgggaattttagaaaatccttagcaaattgctatttgtctctttttgtctgtaattttggctgggcttggtggctaacacctgtaattctagcaagttgggaagccgagacaaaaggattgcttggggcccagagtttgaaactagactgggcaacatagtgagatcctgtctctacactcagttggttgtggtggtatgcctgtagtcccagctactcaggaggctgaggcagtagtaggatcacttgaggccagaagtttgagactgcagtgagccatgatcatgccactgcattccagcctaggcaacagagcaagatcctgtcaaaaaaaaaaaaaaaggagaaaattctcttggcagtgggtaagagtagttattagggttgtagatttcctgtctggaattagagaaagaagggtcatattttctgttattttgtgtatctacctctaagtggactgtttgcctcttgtcacgaattagtagcctcttcagtttaccatcatgtgctcttattttctctgcatacagtgaagtgattgtcattacaatttataatcctgacctggtacttttatatttaattgggctgatattttctaattcttcccagtgtacaaaggttttatgctttgttgttgttgttgagacaggctaggtgctttggatgtggagaattaaatgagcatggcattttcagaggatacttgttggagattgcttgggtaggatggatgtagtcaggtaatggggcctagaaattcagactgaagcatttggtattgatgtgatgggaactggcagcccttgagagattttagctgagaagtgatgtaaaatctgtttggaagactttgagtagaggagattagaggcaaggttaggatgtagggtatgttgcaatagtaattaagacttaagaatcggcccagtggcatgtacctgtagtcctagctactctggaggccgaggcaggaggatcacttgaggctgcaattagctgtgattgtgcctgtgaatagccactgcactccaacctaggcaatataatgagattctgtctcttaaaaaaaaaatgagcacagtgagtactctaaagaaagggggtaaatctaaaagattatttcaaagggagaaaattggcagctttttgggggctacctgatctggaggcagattggagtctggatttgaggaatggagagagatgaggcagatgatgtctaaggcttatagttttgctgcctgagacaaaaatgattcctcagaggttccttcctcttctctacccatcatcccacaattttctactccctccttagctatcttggaagaaaattgatctcttcacacctgaggttctgctctctctccgattccctcctggctgggtgaccttttttgtttgtttttgtttttgttttgagacagagtctcactctgtcacccaggctggagtgcagtggggcgatctcggctcactgcaacctctgcctcccaggttcaagcaattctctgcctcagcctctggagtagctgggattacaggcgcccgccaccgcaaccagctaatttttatatttttagtagagacggggtttcaccatcttggccaggctggtcttgaactcctgacctcgtgatccacccgccttggcctcccaaagtgctgggattacaggcgtgagccaccgcgcgcagcctttttttttttttttttttttttttttttaagatgaattcttgctctgttgcccaggctggagtgcagtggtgtgaccttagcccacggcaacctccatctcctgggttcaagagattcttgtgcctcagcctcccaagtagctgggattgcaggcgccctccaccatgcttggctaatttttgtatttttagcagagagaggtttcaccatgttggccaggctggtctcgaacccctaacctcaagtgatccacctgcttcagtctttcaaagtgctggaattacaggtgtgagccaccacgacctgcataccacttctcaaacagtccttttttgcgtccttgttctctttttcttcctctttctctgcagtctcattcactttcattgattctgctgctactccactctatgaaactctcttctgaactgacttcaaaccaacaaattctacttgtcaactaagctgctcctctaccttgtgttatattcacctaaaatgtaatattatttccttttttatttttcctttggacagggtctttctctgtcacccaggctgtagtgcagtggtgccatctcggctcactgcaacctctgccttctgggttcaagtgattctcctgcctcagcctcctaagtagctgggactacaggcgcccaccaccatgcctggctaatttttgtatttttagtagagacagggttttgccatgttggccatgctggtctcaaactcctgacctcaagtgatacgcctgcctctgcttcccaaagtgctgggattacaggcatgagccactgcgcccagcctattattttcattttgaacccatctcttttattgccaaacacgcatttacttctgtgttcatgatgacatcattatcctattcatctcaaagctggaaaccttgcagtcaatcatttaaatgattaaaatacatttgagtacctcttgagccaggcactgccagtataataaaaaataaaaaaattaaaaaaaggaaagagatagtttgcttttaaggaacttcactgtgtggcaaaaactagtgtaaacaatgacaatacagaatactaagtggtctggtaggtgttatgtatgcagtactttgggagtgtggaggaaggcatgcctagaataatcagggaggacttcacagagtggttatttatagtttaagcagagacataccagtaagagggaatagcatatgcaagtggccagaaatccttggctagctatctgggaggagtggggttgtcaggagataaaggtataaagataggcttatatgccgtgctgtatagttgaatgtttttactattacaaaattttacagatgccctcagtttctccctttattcatttttctatgacatctttattgttggtcttcatttagtctttccttccagtctatcctgtgtaaaattacttcctacttccaaaatgagaaatactgggtctctacttaaatttgtaacctaaatgcctcacacctcattttctgaacaaataaagcccaaattcagtgtcctttttgataggatcctgtcctgacctttccaaatctgatgctagagccttgtgtaccctgagttcagccaaactgaactcttaatggtcccttgctccatactctccccttgctcatgcctttattctcctggtctgattcatctttgcatcttaacagtgtatagcatggtgccttctttttactggggacatatcgagttaatgaatgaatgatgctattacagaggtacagtttgggaaggggagtgagtacattttagaaaggtgataagtggattgtcagccttcatcattttcaatggaccaaattactaaaactttacaggttggttggttttttttcttttttcatttcctcatgtactcaatttctaaggctttttgaatttgagcttcctaatatctcatgcattaatttttttctccattctcaactttcactcttttaattaaggataataatttttttttttgagatggagtcttgctctgttgcacaggttcgagggcagtggtgcgatcttggctcactgcaatctccgtctgccgtgttcaagcaattctcctgcctcagcctcctgagtagctgggattacaggtgcatgccaccacgcctggctaatttttgtatttttagaagagatggggtttcaccacgttggttaagctggtcttgaactcctgaccttatggtccgcctgcctcagcctcccaaagtgctgggattacaggcatgagccactgagcctggccaaggataataaattataatggttttaggttggacatctctgactgcatactgcactgtgtttactggaagaagtcccttaatgtctctaaggcccatttcctcagttctaaattacggctagtaccttcattggagggttgttaagtctatgatacaagataactttttttttttttttttttttgagacagagtctctatcgcccaggctggagtgcaaaatggcacgatcttggctcactgcaacctccacctcatgggttcaagttgattctcctgcctcagcctcccaagtagcttggattataggcatgcgccaccatgcccgactaattttgtgtttttagtagagatggggttcaccacgttggccaggctggtcgaactcctgacctcaggtgatcgacccacctcggcctcccaaagttgctaggattacaggtgtgagccatctctcctggccatgatacaagataatttatatgaagtaatacactgctggttctgaagtaggtgtgcagtaagtgatgcctactgctgcatgccaagagtcaaatgtatatttgaaagagttgtgaatttcaagaaagatatttttgagtttttttttttttctttctgagacagggtcttgtactgtttcccaggctagagtgcagtggcctgatcttggctcctggctgggcccaagtgatccaccgccctcagccttccaacgtattgggattacgggaatgagccactgcatttggctaagtttttgtttttttttttctctatttttccaaacttatttgattagtaagataaagacattaactgctgttgacagtttccatttttaattagtaatcaggagcatttgttgtatttttgtttgataatcagaataatttaatttgtgcaataggatcaatagctttctgtattccaactgttaagtggtgtaagtttattacattgttgctttttgcaggttgtcctttgttctagatagaaatgtttaatttattcttcctggttttcaggggagcccattgaaaggagatccagtctctgaaatttagtggtaggataataacaattgaacagttacttttgaatctaatttaaataatctcaattgtagccttttaaagcaattcctatgaacctttttgaatttagaaaagtaatacttggccgggcgcggtggttcacatctataatcccagcactttgggaggctgagggggtggattatctgaggtcaggagttcaagaccagcctggccaacgtagtgaaaccctgtctctactgaaaatacaaaaaaaaattagctgggtgtggtggcacgtgcctgtagtcccagctactcaggaggctgatgcaggaggatcgcttgaacccaggaggcagaggttgcagtaagctgggattgtgccactgcactccagcctgggtgacagagtgagactttgtctcaaaaaaaaaaaaaaaaaagtcaaacttaaaaatggaatataaaaatctcttgatttttgtcagttttcatatactccctcatttacactcttaatattctattagaaattgtctcttctctctacacacccctttttttcccttttggttaatatgttaagacatcttttcatatgagcatgtaacatgtaacaagattttttttttttttttggacagtgtctcgctctgttgctcaggctggagtctagtagtatgatcacaactcactgcagtttagacctcctgtgttaaagtgattctcctactttagcctcatgagtagttgggactacaggcccatgccaccacgcctggctaattaaagaaaaaattatttggtagagacagggtcttgctatgttgcccaggctggtcttgaatttctggcttcaggcaattctcctactctgcatgagccacctcagccgcgaatattttcttattatgaaatttttgtttagataaatgttgattcacatgcagttgtaacaaattccatggccaggctgggcgtggtggctcacgcctgtaatcccagcactttgggaggctgaggtggatcacctgaggttgggagtccaagaccagcctgaccaacatggagaaaccccgtctctactaaaaatacaaaattagccaggcgtgatggtgcgtgcttgtaatcccagctacttgggaggctgaggcagaagaatcacttgaacccgggaggcggaggttgtagtgagccaagatcgtgccattgcactccagcctgggctagaagagcgaaactccatctcaaaaaaaaaaaaaaaaaatcaggaaattccatgggctaggcacagtgacttatgcctgtaatcccagcgttttggaaggctgaggttggaggattgcttgagcccaggagtttgaggctacagtgaacactgactgtgccactgcactccagcctgggtgaccctgtctcttaaaaaaaaaaaagaatacagagaggtcccttgtatattttgcctggttttgcaatggtaatattttgcaaaaaatatctaataccacacaaccagaatattgatgttgatgtacttcaccaatcgttttttttttttttttttgagtcggagtctccatctgatgcccaggctagagtgcagtggctcaatctcggctcactgcaacctccacctcctgggttcaagcaattctcctgcctcagcctcctgagtagctgggactacaggcgtgtgctatgacgcccagctagtttttgtatttttagtagagacggtgtttcaccgtgttatccagggtggtctcaatctcccgaccttgtgatccgcccgcctcagcctcccaaagtgttgggattacaggcttgagccaccgcgtccagccagtcttacttaggcattgacgttcatgtaatttatccatcttattcagatgtccttaaattttatctttttccttaaaagaaatctgtatttctatcaggacattctggatgtccccagttttactggtagtctttcattgtgtgtatattaagttctttgtttttatcacctgtataggttagtatatccatgactcccgtcaactttctaaatgttcgctgggtgcagtggctcatgcctgtaatcccagcactttgggaggctgaggcggctggatcacctgaggtcagtagttcgagaccagtctggccaacatggtgaaaccccgtgtctactaaaaataaaaaaaaaattagctggatatggtgggtcatgcctgtaatcctagctactcgggaggctgaggttggagaatcgcttgaacccaggaggcggaagttgcagtgagctgagatcgcgccgctgcactctagcctgggtgacagagtatgtctctgtctcaaaaaaaaaaaaaaaagttgctaaacatttctaataccataaggatccctgctgttgccagccgttttaaaactacatccatcgtcttcttggcaaccttccatctctttttcgtatgtgacagcgtcttgctctgccgcccaggctggagtgcagtagttgcatctcagctcactgcaccctctgtgtcccaggcttaagcgatcctcccacctcagcctcctgattagctgcgactacaggcacttgccaccatgccccactaatttttgtatgtttttgtagagatggggttttaccatgttgctcaagctcgtcttgaactcgtgagctcaagcaatccgcctgccttggcctcccaaatggctgggattacaggcaggagccaccatgcctggcctagcccctccatctctagcctttgtcagttactaaactttttttcctgaagttttgtcatttcacaaatgttagataaacatgagtcatacagtatgcagccttttgggattgtctttttttcccttagcataatttccaggggattcatctaagttgttgactaaatcaatagttgttttttttgtttgttttttttttgagacggagtttcactcttgtggaccaggctggagtgcaatggcatgatcttggctcactgcaacctccgcctcccaggttcaagcgattctcctgcctcagcctcctgagcagttgggattataggcccctgccaccacacccagctaatttttgtatttttagtagagatggggtttcaccatgttggtcagggtagtcttgaactcctggcctcaagtgatctacctgcattggcctcccaaagtgctgggattacaggtgtgagccactgcgcacggccctagttttttcctttttatcactaagtaatattccatgatacaaatataccatggtttgcttgaccgttcacctgttgaaggacatctggggcaatgctagcttttggtaattaaggtaaaagtactatttatgttcatttatggggttttgtgtgactgtaagttttcacttctctgggataaataccagtagaacaattgcagtattatatggtaatggcatgttaagttttttttttttcctgagagggagtttcgatcttgttgcccaggctggagtgcaattgcgcgatcttggctcgctgcaacctctgcctcctgggttcaagcgattgtcctttctcagcctcgcatgtagctgggattataggtgtcaaccaccacacccagctcatttttgtatttttagtagagatggggtttcactgtgtttgccaggctggtcccaaactcttgaccccaggtgatccaccctcctcagcctcccaaagtgctgggattacaggcgtgagccacggcgccccgccaatgttcagttgtttttttgtttttttgagacaatctctctctgtcacccaggctggagggcagtggcgcgatcctggctcactgcaacctctgcctcccggattcaagcgattatcccgcctcaggctcctgagtagctgggaccacaggtgcacaccaccacaccaggctaatttttttatttttagtagagacggggtttcaccatgttgggtcaggctggtctcgaactcctgacctcaggtgatccacccacctcggcctcccgaagtgctgggattacaggtgtgagccaccacgcctggcccaatgttcagttttataagaaactaccaagctgttttccctagtgtctgtaccatttacattctcactagcagtatatgagtgatccagtttcttttattttttgttttttgagacggagtctcgccctgttgcccaggctgaagtgcagtggcacgatctcggctcactgcaacctctgcttcccggcttcaagtgattctcctgcatcagcctcccaagtagctgggattacaggcatgtgcaccatgcctggctaattttttgtatttttagtagagatagggtttcaccatgttggccaggctggtctcgaactcctgacctcaggtaatccacccatcttggcttcccaaagtcctgggatttcaggcatgagccattgcacctggccgagtgcttcagtttctatgcatcctcaccagcatttggtgtggtcactattttaattttagccattcgtgtagatatgtagtaatgtctcatctcattatgttttgtttttttttttgagacggaatgttgctcttgttgcccagactggagtgcagtgatgccatctcggttcactgcaacctccacctgctgagttcaagcaattctcgtgcgtcagcctctggagtagctgggattataggtgtgcatcaccacgcctggctaatttttgtattttttagtagacatggggtttcaccacgttggccaggctgttcttgaactcctgacctcaggtgagctgcccacctcggcctcccaaagtgctgggattacagttttgtatggtggattccatgcagagagagttttttctgtagtctagattagcagtccccagcctttttggcaccagggaccaaattcctgggaaacagtttttccacaggtgggagtgggatggtttggggatgaaacttttccaccttagattatcacgcattagttagaatctcataagaagcgcgcaacctagatcccttgcatttgcagttcacaatagggttcatgatcctctgagaatctaatgccacccctgatgtgacaggagtgggagctcaggcgataatgctcccttgtctgctgttcacctcctgctatgcagcccggttcctaacaggctgagaggaccagtaccattctgtggcctgggcgttggggacccctgttctagatgatccacattcttttaaatgcctatatacaaaccatactttctttatttcttttctttttttgagacagtcttactctgtcacccaggctagagtgcaattgcgtgatcttggcacactgcaacctctgcctcccaagttcaagtgattctcctgcctcagcctcccgagtagttaggactacaggtgtgtcccaccatgcctggctaattttttatatttgtattttttaatttttatttatttatttatttttttgagatggagtctcgctctgtcacgcaagctggaatgcaatggcacgatctcggctcactgcaacctccgcctcccgagctcaagcgattctcctgcctcagcctcctgtgtagctgggattacaggcacccgccacgacgcctggcttttttgtatttttgtagagacaggttttcactgtgttgtccgttctggtctcaaactcctgagttcagggaatccaccgccttggcctcccaaagtgctgggattacagtcgtgagccaccgcgccctgccacaaaccatactttgaaaacgttgcttccatttttagataatttgttaggaaaccaataaaatcatacatacttgtgattttcccttagtaaaacacaaattttagtgttttttgctgttattattaatacttctaaagttcctttcacattgctagtgaccttatataaaataccataatgctcttctagcaattgctggaaagataaaatctattttagagaatgaacaattatattttcacattagattaaattaaaagtaattactggttatgtgatattccctcacataccagagtgagtctgaaggtagtctttctttgtaaattatgaggctatatttcctgtgttatctctgatttctcttgatgctgtaattggagttgttgggtctccctggtgaaagtaggtgatgtgcaagttgtgtctatacccagtgaaaataacagacattaatgctacactaatttgtcattggaattttacattcaaaagcatttctttttaaaaatatgattgtaaattggtaatttatagttgtatataccaaaggcatttctttaacgttatagttggttcaactgaaaatacgttaagtctgtttttataattagtatattgaggaacagcacttccatcgtgtcacaatatattaagaattgccagcagggcacggtggctcacgcctataatcccagcactttgggaggcctaggcgggaggatcacctgaagccaggagtcgagaccagcctggctaacgtggccaaacccctatctactaaaaatacaaaaattagccaggtgtgatggcgggtgcctgtagtcccagctactcgggaggctgaggcaggagaatccagaattgaattgaacccaggagacggaggttgcagtgagccaagattgtgccattgcactccagcctggacaacacagcgagactcagtcttttttatttttatttttatttttgagacggagtttcgctcttgttgcccaggctggagtgcaatggcacagtctcggctccctgcaacttctgcctcccgggttcaagcgattcacctacctcagcctcccgactagctgggattacaggcatgtgccaccacgcccggctaatttttgtatttttagtagagatgggatttctccatgttggtcagacttgtctcggactcccaacctctggtgatctgcccgcctcggcttcccaaagtgctgggattacaggcatgagccaccgtgcgtgtccttttttttttttttatcttttgagacagggtctcactctgttggctaggctggagtgcagtgatgcagtcacaactcactgcagcctcaacctcccagtctcaagcaatacccccacctctgcccctttgagtaggctgggactacaggtgtgtgccttcatacctagctaattttttttgttttgttttttgagacagtcttgccccatcgcccaggctggagtgcagtggtgccatctcggctcactgaaagctccgcctcccgggttcacgccattctcctgcctcagcctcccgagtaactgggaccacaggtgcccgccaccacacccggctaattttttgtatttttagtagagacggggtttcaccatgttagccaggatagtctcgttctcctgacctcatgatccgcctgccttggcctcccaaagtgctgggattacaggtgtgagccactgcacctggccatgcccagctaatttttgtatttttttgtagggatgggatggcactatgttccctaggctagtctttaattcttgggttcaagtggtcctcctgcctcggcctcccaaagtgttgggattacaggtgtgagccactgtgccgagccaggttgtgtgtgtgtgtatgtatgtatgtatgtatgtatgtatgtatgtatgtatgtttgtatatatttatatttatttttttggaactgcatctcactttcatccaggcccgaatgcagtgacatgatctcagctcactgcaacttctgcctcctgggttcaagcgattctttttttttttttttttttttgagacggagtctccctctgtcgccaggttcactgcaagctctggctcccgggttcacgccattctcctgcctcagcctcccaagtagctgggactacagatgcccaccagcatgcctggctaattttttgtatttttagtagagatggggtttcactggggtttcaccatgttagccaggatggtcttgatctcctgaccttgtgatccgcccgcctctgcttcccaaagtgctgggattacaggcgtgagccactgcgcctggccatttcttttttttttttggcaagtgattcttgtgcctcagcctcccgagtagctgaaattataggcgtgtgccctcaacgcctgggtaatttttgtatttttagtagagacagggtttcaccatgttggacaggctggtctcaaactcctggcctcaagtgatccaccctcctcagcctcccaaagtgctgggataacagctgtgagccaccgtgcccttcccaggttttatatttattcttttttccttttaaattatgtttttatttaggtattgtacgtaaagtgcttttctaacagagctttggggcagaagtgttagggcaggtcattaaaccactgaaattagttctttggaggagaagataattgttagagttgtaagtgaagtcttgatagataccttatcaatttcatagtaatgtctgtggaatttctttttctgttttttttttttttaattatttcttgaggattaactgctgatagtggaatatcatatatatagttggctcttgatgtacttatttctggatggctttccaaaaggattttaccattttacacacagttctaaatagtatatgaatttagcatttgtcccacacttagatagcactgatttttttttttattaagtgggtgcaaaatgctactacaagattgctttaattactacagttttattgatgaaaatgatttctacttgtttactgtttgtatttttttctaggagttttgtgtctatattctttgctgatgtatctttttggatttaatgttttatacatattaaatttctgtctcattggatataaatattttcccaatctggttttcattttagttaatgattttctgtagttgtatagtcaaagtttcatttattatatagctagatctgtgttttcgagtgatttattgattcaaagcttattgtgcttctagatatttgataaactgactttagactcttgtaaaaatttgaagaactcatatctactacagtcttactgatttaataggggttttaatatccagtactatgctaataatttttatagtgtttttacgacaattttttgagaacataagtttttagagctgtggatggaatgttttctgctctatcagttatcccttctgcgtaacagacccctaagtgtagcagcttagaggagtaaatatttattatctcacattttgtaaggaatcatggagtggcttagctggatggtgctggctcagtctctctaatgaatttacagtcaagatgtctgccagggctgcggtctctgaaggctgtaggatccctgtccaagacggctcactcatatggatgctagctctttgtatgaggcctgttctttcccacttgcacttctccataggcctgcttactgtatggtagctggcttttcccggagtgagtgatccaagagacagggacagaccaagcaggaagatgcagtaactttttatgatgtgtattctattggctggccacacataccaagcagatagggaagggattacacaaaggcatgaataccatcaggctgggataattgggggccagcttggaatctggctaccatatccaaccaaataagaaattaatagttttaattaaaggaaaaggattatattaaatagacattcgttagtttttacttttaagctgacccaatcatttttcagattgaagttttgaatagatatatgattaaaaaatacatgaaaagttaaccagtgaagtgacctctgtgccatgtttgctcaggtaacgcacctccaattcttgtgctttcccggagaccaccttttttaagagaaaggtagtggactgtgcacacttggtcttcctttttcacataatggtgtatgttgaaatctttccattttagagcatagctttccctttttaattttattattattattatttttgagacagagtctccctctgtcgccccagctggaatgcaatggtgcgatctcggctcactgcaacctccagctcctgggttcaagtgattctcctgcctcagccacctgagtagctgggattacagtcgcctgccaccatgctcggctaatttttgtatttttagtagcgacggggtttcaccatgttggccaggctggtctcgaactcctgacctcaggttatccacctacctcagcctcccaaagtgctgggattacaggcgtgaggcaccgtgcccggcaattttttttttttgagtcagagtcttgttctgttgcccaagttggagtgcagtggtttgatctcggctcactgcaacctgtacctcctgggttcaagtgattctcctgcctcagcctcccgagtagctgggactacaggcatgccccaccatgcttggctaattttgtattttagtagagactaggtttctccatgttggtcaggctcgtgtcaaactccctacctcaggggatccgcccaccttggcctcccaaagtgctgggattatagacgttagccaccgcgcctggcctaatttttgtattttcagtagaaatttttgtatttcactgtattggtcaggctggtctggaactcctgagctcaggtgatccacccgcctcggcctcccaaagtgctgggataacaggagtgagccactaggtgtgacctaatttttgtatttttagtagagatgggatttcaccatgtcggctaagctggtctcgaactcctgacctcaggtgatctgcctgccttggcctcccaatgtgctgggattataggcataagccaccgcactggctttttttttttttttttttttaaacctggatggttttattttgcatgaatgtatagatatttcctgttcatacattctgaaagtgaacaactgtatatatgcaatttatttttattcttatttatttatttgtttattttttgagaccagagtctcactctgtcgcccaggctagagtgcaatgacacaatctcggttcactgcaacctctgcctcctgggttaagcaattcttctgcctcagcttccccagtagctgggattacaggtgtccgctaatttttgtatttttacaaaatacacccaggtaattttttgtaattttggtagagacaggtttcaccatgtcggccaggctggtctcgaactcctgacctcaggtgatatgcccgactcagcctcccaaagtgctgggattacaggtgtgagccactgcgtctggcctgcatggggattcttaatgaagattaattattgtagttgagggggaaaaggaataataaatatttattggaccctaaataccttcgaatatggaataccctaggtattctagggcatttagggaccaataaatatttattcctccgtactcttccctcgctcttttcagatttttttttttttttttttttttttgagatggagtcttgctctgtctccaggctggagtgcagtggcgcgatcttggctcactgcaacctctgcctcctgggttgaagtgattctcttgcctcagcctcctgagtggctgggactacaggtgcataccactatgcccagctaatttttgtattttttgtagagacaggctttcaccatgttggccaggatggtctcgttctttagacctcgtgatctgtcttcctcagcctcccaaagtgttggaattacaggcgtaagcctccgccgggccttttttagatttttaagagaatttttgttaaagcatgaacttaaaaaatcagacttggcttggagcggtggctcatggcctctagtcccaggactttgggtggctgaggcaagtggattgcttgagcccaggagttcaagacctgccttggcaataatatcaagaccccctcttcatgaaaaacaatcaagctaatacttgatactattttacataagaattttttatagtatgtcatgttttaatgtatattggttatatagttgcaaatttaaaggcatggtggtggctcatacctgtaatcccagcactttgggaggctggggcgggcagatcttctgaggtcaggagttcaagaccagcctggccaacatggtggaaccccgtcttaggctgaggcaggagaatagcttgtgcccaggaggcagaggttgctttgagctgagatcgcaccacggcattccagcctggaggacagagcgagactctgtctctaaataaataaataaataaataaatgtatactaactgcattagcaagactccgtctctaaataaataagtgaataaataaatgtatactaattgcattttaaaaatcaaagtataggccgggtacggtggctcacaactgtaatcctagcacttttggaggctgaggtggatggatcacctgaggtcaggagtttgagaccagcctgaccaacatggtgaaactttgtctctactaaaaatacaaaattagctggtgtggtggcgcatggctgtaatcccagctactcgggaggctgaggtaggagaattgcttgaacctgagaggtggaggttgtggtgagcggagatcgtgctgttgcactccagcctgggcaacaagagcgaaacttcgtctccaagaaaaaaaaaatatataattcacataagataaaattcaccctctttggccaggcgcagtggctcatgcctgtaatcccagcactttgggaggtagaggtgggcagatcacttgaggtcagggagtttgagaccagcctggccaacatggtgaaaccccatctctactaaaaatacaaaaattagcccggtgtggtggcatacacctgtaatccacctactcaggacgctgagtctgcactcagtccctgggctacagggtgaaactgtatctcaaaaataaagaataaaatgcagctacttaaagggtgtagagttgaacaactgttaccactgtctaattccagaacctttcatcaccccaaaagaaaacccattcccagcagtcatttcccattaagtctcctctagcccctcacaaccactaatctaattcatgtttctatgtatttgcctattctaggcgtttcatacaaatacagtcatataatttgtggcctttcgtgtctgacttgtttaacttagcataatgttttaaggcccatttatgttgttgtatgtatgcatacttcattccattttactgctgaatattgctttgtactgatgccactttttgtttgtcttttcatcacttgacggacattttgtttcttccactttgtggctgttacaggcagtgctactgtgaaaatttgtattaaagttttagcgtgaatatatgttttcagttctcttgggaaaatacctagaagtggtattgtcggatcatagggtcattctatgtttagcattttgaggaacagccagactgttttacatagtggttgcaccgttttacagtcctactttagcctatatgggttctaatttctttctttctttctttctttctttctttctttctttctttctttctttctttctttctttcttttctttcttttctttcttttctttcttttctttctttctttctttctttttttagaacagagtctccctctgtagcccaggctggagtgcagtggcatggtcttggctcactgcagcctccgcctctcgggttcaagcaattctctgcctcagcctcccaagtagcttggactacaggcgcccgccaccacgcctggctaatgtttgtatttttggtagtgacagggtttcaccacattggccaggttggtcttgaactcctgacctcaggtgattcacccacctcggcctcccaaagtgccgagattacaggcatgagccactgcatccgggcgtgggttctaaattcttaatattctcatcaacatttattgctgtctttttaattttagcctgtaatcccagctactagggcgactgaggtggtagcatcgcttgagcccaggaagctgaggctgcagtgagccaagattgcaccactgcactccaggctaggtgatgaagtgagacttcatctcaaaaaaaaaaaaaaggaagtaatggcaaaaactggaattattttgcaccaacttaaatatttagatctttaatacctttggaaagttttttatatatagtttgtgtgtgtgtgtgtgtatatatacacacatatatatatacacacacatatatacacacatatatatgaatgattttatatatatatatatatatatatatatgaatgatatatatatatatatatgaatgaatgaatgagatggagtctcactctgtcacccaggcaggagtgcagtggtgccattttggcttatggcagcctccgcctccggggttcaagtgattcttgtacctcagcctcccgagttgctgggattacaggcactcgccaccatgcccggattttttgtcttaattcatgaaggatgaattaagtctgcagttgttctttttccctttttctttccagtttttttttttgtttgtttgtttgtttttgagacacagtctcactcggttgtccaggctggagtgcggtggcagtatcttggctccctgtaacccatctccctggttcaagcgattccggtgcctcagcttcccaagtagctaggattacaggtgtgtgacaccacacctggttaatttttgtatttttagtagagacgaggtttcaccgcattggttaggttggtctcaaaactcctgacctcaggtgaaccgcccacctaagccttccaaagtgctgagattacatgcatgagccaccaagtctggcctaagtctgaatttttttttttttttttttgagacggagtttcgctcttgttgcccaggctggagtgcaatggtgcgatcttggctaaccgcaacctccgcctcccacgttcaagcaattctgcctcagcctcccgagtagctgggattgcaggcatataccaccacgcctggctaattttgtatttttgttagagatggggtttctccgtgttgagactggtctcgaactcctgacctcaggtgatccgcctgcctcggcctcccaaagtgctgggattacaggtgtgaaccactgcacccggccgaatatatttttttttttttaaatggagtctcgctctgtggcccaggctggaatgcagcggtgtgatcttagctcactgcaacctctgcctccctggctcaagcgattctcctgcttcagcctcctgagtacctgggaccacaggtgtgcaccaccatgcctgaataatttttttgtgtttttgtagagatggagtttcaccatgttggccaggctgatcttgaactactgacctcaggtgatgtgcctgcctccgccttcccaagtgctgggattacaggcatgagctactgtacccggctaagtgtacagtgttcttgtgatgtctttgtctggtgttggtatcagggtaatactgtcttcaagattacccttgaatgagctttacttcattttttaatgtgtttttttttcttttcttttgttttttgtttttgagacagagtttcactctgtcgcacaggctggaatccacactctaggctcgctgcagcctccacctcccaggttcaagagattctcctgtgtcagcctcttgagtagctggggttacaggcacgtgccacgacgcccggctgatttttttgtatttttagtagtgacgggctttcaccatgttggccaggctggtctcgaactcctgacatcaagtgacctgccttcctcagcctcccaaagtgttgggattacaggagtgagccactgtgccccgcctgcaattacttcttaagttctcaattaaaagagagtttatcaaggactttttttggtaattttgcattttgaaaattgctaacattaactgggacagcccttttatttatttatttgtcactcagttgtttttttgagttgcctactatgtcccaggcactggtaagataggagtatcattgtacctgaggcagggcaacatgtgcttgcttgagaggagcatgatctaggattataaggactgcaacctccccttcccaggttgaagcagttctcatgcctcagcctcccaagtagctgggactacagccatgagccaccacgcccagctaatttttgtgtttttagtagagatgaggtttccccatgttggccaggctagtctcaacttctggacctcaggtgatctgcccacttcagcctcccaaagtgctgaaattacaggagtaattttattctcccaaagctgctgctttgggagaataaaaagttgagtatgggccaggcatgggggctgatgcctgtgatcgcagcactttaggagactgaggtgggagtctagcttgagcccagtagtttgagacaagcctggggaacatagggagatccggcctctacaaaaaaaataaattagctgggtggagtggcatgtgcctgtggtcccagctacttgggtggttgaggtgggaagatatctgagctcaggagttccaggctgcagtgagctctgattatgcactccagcctgggtgacagagtgagatgctgtctcaaaaaaaaaaattcagtgtggcgtgattaggctgggagggtggggcaggaagggatgacattggaggggtaggcaaggtgtagatagacctttccctatattctcctatttttaaaaaatttttttctaaatagagatagggtcttactattttgcccaggctgggtctcaaactcctgggctcaagtaatccttccatctaggcctctattttttgtgcaaacgattgaaattatattttttttacctgaatttttcctgtgaacattgggttatttataaacctgttttctgtttctttctttctttttttttttttttgtttttgttttttgagatagagtccagcctggagtgctgtggcatgatcttggcacacttgcaacctctgcctcctgggttcaggtgattctcctcctctagcctcctccacgcctggctaatatttgtatttttagtagagatggggtttcaccatgttggccgggctgttcttgaactcctggtttcaacagatccacctgcctcagcctgccaaagtgctgagattacaggtgtgagccactgttctaggcacttgtttctgtttcttaattttggctgctactcagtgggaaaaagcacagattgaatctaattgaggccgggcgctgtggctcactcctgtaatttcagcactttgggaggctgaggtgggcagatcacctgagatccagagttcgagactagcctggccaacatggggaaacctcatctctactaaaaacacaaaaattagttgggcgtggtggctcatggctgtagtcccagctactcgggaggctgaggcatgagaattgcttcaacccgggaggtggaggttgcagtgagctgagatcaggacactgccctccaggttgggcaagagagtgagactcggtcttaaaaaaaaaaaaaaatctagttgaaaaatgtcatcgggtctttccaaatttttactaggaatttgttaaaattaaccaggctggaagtcattatagtttgtttgtttgtttgtttgagatgggggtctcactctgtcacgcaggctggagttcagtggtaggatctcggctcactgcaacctctgcatcccagattcaagcgatcctctcacctctgcctcatgagtagttggaaccacaggcatgtgtcaccatgcttttgtagagacagggtttctttcgccctattggctaggctggtctcaaacttgtgagctcaagcgatccgcccaccttggcctcccaaagtgctgggattacaggcatgagttaccttgccttgcccattatagcttttttgaggctgggtcttactctctgtcatgcaggctggactgcagtggtgtgatctaagctcactgcctcctgggctcaagcagtcctcccacctcagcctcctgagtagctggcacaggcgctacctcacccatctaattttttattttttttagagatggggttttgccatgtttgcccaggctggtctagaattcatgagctcaagtgatctacctgcctcggcctcccaatgtgctgggattacagacatgagccactatgttcagccatacctggctaatttttaaaaaatgttttcaagagacagggtctccctgtgttgcccaggttggtctcaagttcctgggattactgctggccttcaaaagtaaatgtgaaataattagttaatttctccctcagttgacaaataatgccaaaagtgataaagattaatgaaatgtctcttttttttttttttttttgagacggagtctcgttctgttgccaagtctggaatgcagtggcacgatctcggctcactgcaacgtccacctactgggttcaagtgattctcctgcctcagcctcccgagtagctgggactacaggcacgcatcaccatgcccggctaatttttgtatttttagtagagacggggtttcactatgttggccaggctggtcttgaactcctgacctcatgatccacccaccttggcctcccaaagtgctgggattacaggcatgagccaccgcgcccagccatgaaatttcttacgtagaaaggcagcttgggattgtagaaagaatgtaggctttggagttggacaggcctccatttgagaccatacttgagtcccgtgcttgccttagacaaagaacctctcaaccttagtttttaatctataaggtgttttgaaaattaattcctagttcagtacatggcacatggtaggtacctgctgctatccataattctcttagttaatatattcggtgccacatgccaggcagccaggatctgtactaagcacctaataagtattatctcatttaatcctcaaaagaaccccacctgagttgctagacagccattatttcagggttacacattaggaaattgaagcttagagagatttaagtggttagccaagtgatggtgctggtattccaactaaggtcatctgctttcagagcatttactttctgttaggctgcctctcctgttgcaaagtactaagaacacaactacataatgtatttttagtggattcttgtctttttgtaaatagaaggttaaaatgagaggaattttttttttgtttgggagacgtggtctcgctctgatgagagctagaaatttgattacttgtatttctggtctgcataaaaatttggcctaaaaacatcaatagaaaggcaagtgtcatctgcaaatctgtcccatcctgttcttcacaggaaaatgtaaccttttttttttttttttctttttttgagatggagtctagctctgttgcccaagctggagtgcaatggcatggtttcccgctcactgcaacctctgccttctgggttctagcagttctcctgcctcagcctcctgagtagctgggattacaggcgcctgccaccatgcctggctaatttttgtatttttagtagagacagggtttcaccatgttggccaggctggtctttaactcctgacctcaggtgatccgcctgcctcggcctcccaaagtgctgggatcacaggtgtgagccactgcgcccgggctcaaaatgtaacgtctgtctagtatgaggatttatttccttgtctgacttctgagttgtaatcgtttattaacaatcacattgtaagtttatctatgaagtaataaaatgttctttctgtatattatactggaaatgaatgcttcattcaaaaaatagttttatcttgggaaggtagccactttttaaaaattgaggtaaaacggccaggcacggtggctcacgcccataattccagcactttgggaggccaaggtgggtggagatcacctgaggtcagaagttcaagaccagcctggccaatatggtgaaactccatctctactaaaatacaaaaattagaccggcatggtggcaggtgcctgtaatcccagctactcaggaagctgaggcaggagaatcgcttgaacccaggaggtggaggttacagtgagccgagatcctgccgctgcattgaagcctgggtgagaagagcgaaactctgtctcattaaaaaaaaaaaaaaagaggtaaaatttaaataacttaaggctgattgtattggcttacacttgtaattccagcattttgggagaccaaggcaggaggatcacttgaactcagaagtttgagaccagcctggtcaacatagggaaacctcatctccacaaaaaataaaaaataaaatataaaaacttcaaaattaaataagttacagttcaccattgtaaccattttattttatcctatttattttgagacagtcttgttttgtcacccaggctggagtacagtggtgggatcacagctcactacagcctccaccttccaggttcaagtgattcttctgcctcagcctctgtaactgggattacaggtgcttgccaccacaccctgctaatttttgtattttgattagagacagggtttcaccatgttggcccgattggtctcgaactcctgagctcaagtgatctgcctgtcttggcctcccaaaatgagccaccgtgcctgtccccttagtctactttaaaattcaatttgccttttttttaaattgtaagaattccttatatattttggatattaaatccttaactagggatatgattcgcaaatttttttcccccattctgtttctgtaggctctttgacattctttttctttctctttttgagacaaggtcttactctgttgcccaggctagagtacagtggtgtgatcatagcttactacagcctcgacttccctgggctgaagcaatccttacctcccacctcagcctcccaggtaaccaggactacaggtgtacaccaccatgcctggcaaatcactgttgttgttgttgttgttgttatagccataggctcccactgtgttgcccaggctgggctcaagcaatcttctagccttctagccttggcctcccgaagtggtgggattatgcgcatgatcgctgctcccagcccacaatctttttttttttttttttgagatggagtctcgctctgtcacccaggctggagtgcggtggcgcaatctcggctcattgcaacctccgcctcccgggttcaagcgattctcctgcctcagcctcccgagtggctgggattacaggcacgtgctgccacgcccagctaatttttgtattttttttttagaagagatggggtttcaccatattggccaggatggtctcgaactcctgacctcatgatatgcccaccttggcctcccaaagtgccgggattacaggcatgagccaccgcgcctggcctcccagcccacattcttgataattttctttgcttctaaaagttttgcttttagggttgggcaaggtggcttatgcctataatcctagcactttgggaggctgaggtgggcggatctcttgagctcaggagttcaagaacaccctgagcaacatggaaaaaccgtgtctctacaaaaaatgcaaaaattagccaagtgtggtggcatgcacctgtagtctgagctactggggaggctgtgacaggaggatcacttgaattggactggaggctgcagtgagtgaaaatggtaccactgcactccagcctgggtaatagagtgagatgctgtctgaaaaaaaaaaaaagttttagtttttttgggtggggggattttaacttcacctattttttttgttgttgctcagttttgttgttcaatctatgaatcctttgccagatctgaaattatgaacccttatccctaaattttcttataaaagttttgtagttttagctcttatatttaggcccttgataacattttgagttactttttttttttttttttccctgagatggagtctcgttctgtcgcccaggctgtagtggcgcgatctcggctcactgacatggctgcttcctgggttcaagcaattctcttgcctcagcctcctgagtagctggggttacagtcacgtgccaccatgcccagctaattgttttgtgtaattttagtagagatggggtttcagcattttggccagggtggtcttgaacacctgacctcaagtgatctgcccacctcggcctcccaaagtgctgggattacaggtgtgagctactgggcaaggctgtgccagaccttgagttactttttatatattgaatgaggcataagccaaagtttattaggtgatccagttttctcagtaccatgtgttgaagagactattattctttttccattgaattcaaaagagactaattttttaacattcctttgaaatgctattctttttccattgactattgttttctccgtgtcaaaaatttattgaatatggccgggtgtggtggctcacacctgtaatcccagcactttgggaggccgaggtgggtggatcacctgaggtcaggagtttgagaccagtctgtccaacatggtgaaacccatttctactaaaaatacaaaattagccaggcttggtggcgcatgcctgtaatcccagctacttgggaggctgaggcaggagaatcgcttgaacctgggaggcagaggttgcggtgagccgagatcgcgccattgcactccagcctgggcaacaagagcaaaactctatctcaaaaaaaaaaaaatatatttgtgaggctttatttctgaagttttaattttattccattggtctatatttctactcgtaggctactagtacacactgtttttgattactgtagctgaattctgcttctgcgagttcttcagtcttattttattttccagtacagatggtctcagatatacgatggttttacttagagtttttgaacttcatggtgggcttatctggacgtaagcacatagtaagtcgagcatctgcagttaacaatggttcaacttaacgatattttcgacttatgatgggttaatcaggatgtaaccccattgtgagttgaggagcatctgtattgttttggctgtttaggcttcctacagttgcatatgatttttactttttggcggaggtgtccggtattgaatgaacctagggcctcatgcatagagttccatatgaatttgaggttagctttttcatttctctaaataggccattggaattttcatcgggattccactgaatctgtaaatgattttagggagtattgccattttaacaacacagtattaaaaattccaagtaatgaacttgggatgtcttcccatttctttaggtctttaatttcctttcaataatgttttgtaattttcactgtataagacttttcacagcctaggttaaatttattcataggtacaaacagttgttaattcccacagttttacttaatgattttttaactttatgatagggtttactggaggattgaatgcattttcaacttatgatatttttgacttatgatgggtttgttgggacttagccctgttgtaatttgagaagcatctatctgtgtgtctttcttttggatcctgttaagtgggattttttgctcagtttcctttttggattgttcattgctttttttttttttttttcttttttccggagacagagtctcactttgtcgcccaggctggagtgcaatggcgtgatcttggctcactgcagcctctgcctcccgggttcaagtgatttctcctgccccaccctcccaagtagctgggattacaggtgcccaccaccacgcccagctcatttttgtatttttagtagagatggagcttcaccatgttggtcaggctggtctcgaactcctgatctcaggtgatccacctgccttggcctcccaaagtgctgggattgctggcatgagccaccatgcccgaccagtgtgtttatacctgtagcgtaaaaatccatgcttcaggatttgatgagtcttggaaagcattttctgcatcctgctggttgtggaagcgtttttcctgcaaaaaagtagttgagatgcttgaagaagtggtagtcagttgcagagaggtcaggtcaatatggaggatgaggcaaaacttcgtagcctaatttgttcaacttttgaagcattgtttgtgcaacgtgtagttgggcattgtcatgaataattgggcccttttagttgaccaatgccggctgcaggcactgcagttttccttgcatctcattgatttgctgagaatacttctcagctgcagtggtattcagaaagctgtagtggatcaaccagcagcagaccaccaagcagtgaccatgacctttttttggtgcaagtttggtttgggaagtgctttggagctgctgcttaagtctatccactgagctggtcattgctggttgtcagataaaatccacttttcattgcatgccacagtccgattgagaaatggtaaacgacgactttttttttagtttttgctcagctgatgaggcacccacttattgagctttttcacttttccaatttgcttcaaatgctgaacgaccgtagaatggtcgacgttgagctcttcgacaacttcttgggtaagttgtaataggatcagcttcgatgattgctctcaattggtcgttgtcaacttcccatggccggctactactcctcatcttcaagggtctcgcctgcttcgcaaaacttcttgaaccaccactgcactgtacgtttgtttgaagttcctggggcaaacgtgttgttgatgttgtgaattgtctccactgctttatgacccattttgaacctgagtaagaaaattgctcaaatttgctttttgtctagcatcatttccatagtgtgaaataaacataaaataaacaagtaataagtctttagcaaaaataacataaagcaagaaagtgcccattaaaatgatatataacataaccacatttatttaagaatgtattccaatatcaaattgcaaattccaacagtgcaaaaactgcaattacttctgtaccaacctaatagtttgcttagtgtttttatcatgaaaaggtattagatttttaaaatgttttttctgtctgttgaggttatcatgtgttattttgctttgttgtattattgtggtgtataattttttttgagacggggtcttgctctgtcgcccaggctggagtgcagtggcgcgatctctgctcactgcaagctccacatctcgggttcacgccattctcctgcctcagcctcccgagtagctgggactacaggcgcccgccaccacgcccggctaatttttttttgtatttttagtagagatggggtttcaccgtgttagccaggatggtcttgatctcctgacctcgtgatctgcccgcctccgcctcccaaagtgctgggattacaggtgtgagccaccgcgcccagctgtggtgtataatttatttttttttctttttttggtgggagtcagtaccctttttgtttttgtaaagtatgcatgattttatttaatttttttttttagagacggagtctcgctctgtcgcccaggctggagtgcagtggcgtgatctcggctcactgcaacctccgcctcccgggttcaagcaattctcctgcctcagcctcctgagtagctgggactacaggcgcatgccaccatgcccggctaattttttttgtattttagtagagacggggtttcaccatgttgcccaggctggtctccaactcctgagctcaggcaatccgcctgcctcagcttcctgaagtgctaggattacaggcgtgagccactgcgcctggccaacttcattttttatttttttggaaagtgtacgtgacttcctattcatccatttggaagtgtacaattcagtgcattacatgtattcacagtgttatataatcattttctataccaaagtttttcaatatccccaacataaactatccattaaatagtaattcctaatagttccctattcctactccttggtaacctaaattctttctctccctttgaatttgcctgttttattttagataatataagtagtatcatataatatttatctgtttatatctggcttattaacataaagtggagccaattttagcacatttttgtcacttcaaaatgaaaccttcttgcttgataatttaccatgttaaaaaaaaaaaaaaaggaaaccgggcggggcgtggtggctcaggcctgtaatcccaggactttgggaggccgaggtggacagatcacaaggtcaagagattgagaccgtcctggccaacgtggtgaaaccgtctctaataaaaatacaaaaattagtagtgcgcctgtagtcccagctactcaggaggctgaggaaggagaatcgcttgaaccaggggggcagagattgcagtgagccaagatcacgccgctgcactccagcctggcgacagagcgagactccgtctccaaaaaaaaaaaaggaaaccttgtacgctttagttaccatcctcctacaccttaacttccctgcccctaagtaaccattatactattgcctgtctctacatccctctatttgagactcatatgaatgaaattatataatatgtagacttttgttactgtttttttctattagcatgatgttttgcaggtttatccttatttagcatgtatcagcggccacataatacttcattgtatggatatttcacattttgttatccattcatcagttgatggtcatcatcccaaacaagaactctgtacttattgaatgattctcctttcctccctttgtctattttggccattttgtagtaactctatttgcctatcctaggtattttatttaagtggagtcatacagtatttgtctatttgtgtctggtgtatttcacttagcataatgctgtcaaggtttttgcatgttgtagtgtgtatcaggacttctttttcatggttgaatgatcttccatcttgtaaataataacacattgtattatccatttgtgatggacatttgagttgatttcaccttttcgacaatgtaaataatgtcgctatgaacatgggtgtgcaaatatctgtttgagtctctgccttcagttctttttggtatatgcttagcagcagaatagctgggtcacatggtaattccatacttaactcttagaggaagtccgccccttcctttcttaagtctttgctgtatacctttgaagggtttccctagtttatataattgcttgtgatagtttttcccctatttattgactgttttgggggagatactggcccttgaagttcatgacgactccatttcctctgatgtcactataaacacttttgactgtggcagcctttgctaaaaatatttttggatcctggatgtggtagttcatgcctattataatcctagcactttgggaggccaaggtgggagaatttcttgagttgggagttagagacacttttggagtttgtttttttataattgtcttttttttttccatctcagtcttaaagttatttcttcaaagacataattgtgcttaggctttgatgctttcatcaggtaaaatgaaataaagactgaatctgatgaataaataaaactagtagataacagcttctaagtgtgactttgaagtaacatgaatggtttttatcatatgatacatagaaatgacttcttagtggtaatatatggcaggatttggcaaactagcctgcagtccaaatatggctaaaagctgtttttgtacaaccagtgagccaacaatagtttttacatttgtgaatcgctgaggcaaaatccaaaggaaaatattttgaggccgggtatggtggttcacgtatataatcccagcattttgagaggttgaggtgggaggatggcttgggcccaggacttggagaccagcctaggcaacatagtgagatcctgtctctaaaaattttttttaaaaactagctgggcatggtggtacataccttgtagtccctgctagttgggaggctgaggtgggaggatcacttgagtctggtatgttgaggctgtagtgagctgagatcctgccactgtactctagcctgggtaacagagcgagaccctgtctcaaaaaaaaaaaaaaaaaaaaagaatattttgtatcatgttagaattaaattaagccgggcgcggtggctcacgtgtaatcccatcactttgggaggcctaggtgggcagatcacgaggtcaggagatcgaaaccatcctggctaacacagtaaaacctgtctctactaaaaatacaaaaaattagccgggcgtggtggcaggtgcctgtagtcccagctactcgggaggctgaggcaggagaatggcgtgaacccgggaggcggagcttacagtgagccgagatagcgccactgcactccagccttggcgaaagagctagactctgtctcaaaaaaaaaaaaaaaaaaaagaattatatgaaattaaaacttcagtaactacaagaagtctattggaatgttgccactaatatgttgtctggctgcttttgtgctgtgatgggaggattgagtaatttcgagtgtatgtcttacattgcagaatctaaaatatttactatctggcttttttttttttttttttttttttgcgacggagtttcactcttgttgccgaggctggagtgcaatggcacgatctcggctcaccgcaacctctgccttctgggttcaagcaattctcctgcctcagcctcctgagtagctggggttacaggcacgtgccaccacacccagctaattttgtatttttagtagagacgggatttccccatgttggtcaggctggtctcgaacttttgacctaacatatctgcccgcctgggcctcccaaagtgccgggattacaggcatgagccactgcacctggcctactatctggctcttatacagaaaaaagtttatcgacgtgtgtgattgtcacaggttattattgattggtcttctgagaacaatagtcattcatatgtgttctaatgcgactgccaaaatattatttcataagcacatttaatatgttaacttttaatggatgaagcagtaatttggtagttaaatgaacattaattcaacttgctttggttagtgggaaggatattttagtgttattttcatattcacattatcctgctggtcagcattcctttttattctcctccttggtcgtcagaaaagaggttaaaaaggccgggcgcggtggctcacgcctgtaatcccagcactttgggagtccgaggcgggtggatcacgaggtcaagagatcgagaccatcctggccaacatggtgaaaccccgtctttattaaaaatacaaaaattagcagggcgtggtggtgccccagctacttgggatgctgaggcaagagaatcacttaaacgcgggaggcggaggttgcagtgagccgagatcgcgccactgcactctggcctgggcaacaagagcgagacagattacaggcgcacgccaccttgccaagctaatttttgtggttttagtagagacagggcttcgccatgttggccaggctggtctcgaactcccaacctcagatgatcgcctcccaccttggcctccccaagtgctgggattacaagcgtgagccactgcacccggccagaagttattatataatcaatgcaccattgcccaaaatacttatctgaattttttttttttgacacggagtcttgctcttgtcacccaggctggagtgcaatggcgtgatcttggctcactgcaacccctgcctcctgggttcaagcaattcttctgcctcagcctcctgagtagctgggattacaggtgcccactacaacgcccggctaatttttctttgtatttttggtagagatggagtttcaccatgttggccaggctggtatgaaactcctgagctcaggtgatctgcccacctcggcctcccaaagtgctgggattacaggtatgagccaccgtgcctggccttatctgacttttttttttttttttttttgggacagtctcgctctgtcacccaggctggagtgcagtggcgctatcttggcccactgcaagctctgcctcctgggttcacgccattctcctgcctcagcctcccgagtagctaggactacaggcacccgccaccacgcccggctaattttttgtatttttagtagagacggggtttcaccgtgttagtcaagatggtctcgatctcctgacctcgtgatccactcgcctcagcctcccaaagtgctgggattataggcgtgagccactacacccggcctgacttttaagccattgtatttattatatcattgatttagttttgggcaaatgtggtcacagaagatttggacaaatgttgtcacaaaaggttatgcttaattttccgtaatttatttcggcagtgagtaggaagaaaatttgaatgcgtatatgttacagacagtctttttgaggctggggacgtggctcacacctgtaatctcagcactctgtgaggccagtgcaggaggatcgcttgaacccttgagtttgaaaccagcctcggcaacatggcaaaacctcatctctaaaaaaaaaaattttaaatttagccaggctggtggcatgtgtcattagtcccagcgacttggtggggctgaggtgggaggatcacttgagctcaataggtataattttcagtgagctgtgattaggccacagcacattagcctgagtgacagagtgagaatctgccttaaaaaaaataaagtatttgaaagccttcttcagaggttattcttggaaaagcaaataatattatagccttgagtataatagtgtcatatcatttaagccatatggaaaataatactttgtatgaaaatagtaacatctagagtagttttattaataaaatactctccagatggcaagtgatagatacatcctgtttcgattttacaacaaagcatgtttgtgatataaacattattcgattgcaaaaattcttttttttttttttgaaatggagtcttgccctgtcacccatgttggagtgcagtggcgccatctcggctcactgcaacctctgcctcctgggttcaagtgattctcctgcctcagtttcctgagtagctgggattataggcacatgccaacatgcccagctaatttttgtagttttagtagagacagggttttaccatgttgaccaggctggtctcgaactcctgacctgaagtgatctacctgcctcggcctcccaaagtgctgggattgcaggccttagccactgcgcccggcccgattgcaaaaatcgtaacatttcagtgacttcagtgttttgaaattgagggattaaaatctaagatctaaatattcgattcttcttccttttttttttttgagatggagtttcacgctttttgcctaggctggagtgcaatggcacgatctcggctcactgcaacatccacctcccaggttcaagcaatttttgaatcccatagtgctgtgttgggattacaggtgtgatccaccatgcctggctattcttttttttttttttcttctttttaaagagacagtatcttgctctgtggcccaggctagagtgccgtggcagtcatggcttactgcagtcctgaactcctgtgcttaagcaatcctctcacttcagccttctgagtagctagtaccacaggcacacaccaccacacccgaccccattattgttctattgatgtttataactgtataattagtatataatctgcatttaccagaaatctgtaaaatctggttatgtcattacttttcctgattattggtacagttaaaacctagaaaggctcattcatataagggatacattgtgttggaagagcttataacaactttgttttatattttgccaaaaagcctttggattctttagctcgagggtgtagtccagattccaggtccaacttctagagttctggaggagtggcagatatccatttcttggggatcagtcagaagtgagctcattaattaattggaaactttttgttttggatgtttcagtggtaaatgaaaacaataccccctactagaattattgtgaggattctgttacattatgtgtgaaagaactgattacaggtgtcacaaattactttcttactcattaatttattaattatgtgctatgcactgttttgttttgtttttgagacagggtctctgttgtccaggctggagtatagctgtgcagtgtttttaagtgctgggaatactgtgatgagcagaatagacattgtgtctgccctcatggatccttcagtaaagtgagaaaggcaaacatcaaacaaggattgggcctggcacagtggctaatgcctgtaatcccagcactttgggaggctgaggtgggtgggtcacttgaggtcaggagttcaagaccagccttgccaacctggtgaaaccccctctctactaaaaatacaaaaattagccaggtgtggtggtgcatgtctcccagctgctcgggaggctgaggcaggagaatcgcttgaacccaggaggcagaggttgcagtgagccgagattgtgccactccactccagtctgggtgacagagcaagactctttctcccaaaaacaacaaaaaacaaaacaaaacaaaaaaacagcaacaacaacaaggattgcttgagcctgggaggttgaggctggagtgagcgatgaccatgccactgcactccagcctgggtgacagattcattcataccctgtctttcaaagaaaaaaatatcagtattagattgtatgttcacaattatatgtgtgagaacctatatgtatgggaactctttgtgccaaccagtgcccagagttttctctctgctctgattactctctcaactctctcaaattgccttttaaagaaatctttatttctgttaagattttagagctatttgtttttggtttttgcttaattttttgcatattctgttaatgcaaaaaattgcattaaattattattattatttttgagatagaatcttgctctgtcgcccaggctggtgtgcagtggagcagttttggctcactgcaacctccaccttccgggttcaagtgattctcatactacaacctcctgagtagctggaactacaggcatgcgctgccacgcctggctaatttttttgtatttttagtagagacagtttcatcatgttggccaggctggcctcaaactcttgggcctcaagtgatctgcccaccttggcctgctaaagtgcttgaattatagatgtgagccccactcctggctgcattaaaatattttaatagacatttgattgattgattgattgatttatgagatggagttttgctgttgttgcctaggctggagtgcaatggcgggatctcggctcaccacaacctccgcctcccgggttcaagtgattctcctgcctcagcctcctgagtagctgggattacaggcatgcaccaccaagcctggctaattttgtatttttagtagagatggggtttctccatgttggtcgggctggtcttgaactcccgaccttaggtgatccacctgcctcggcctgccaaagtgttgggattacaggcgtaagccaccgcacccggcctttaatagacatgttttaaatttataaggattaagaaaaacccctaaaaataaaaaacaaatttataatgattttatagttaaaaggttttgttgttgagacagggtcttaccctgtcactgaagctagagtgcagtggagtgatcacagctcactgcatcctcgacctcctcggcttaagtgatccttgtttaatgtttgtttttaagaacattaaaaagtgctttgttgaaagtgtttggtttagcacatttttattgattactgagtaggtgctggagtttaaaacatgaataagacaaaaaaaatgaatagaaaataagattattgcctctgctgttgagactcttagagtgtggtattaatatcaatgtaatgtgtcaagtgcagtaaaaagaggtatgcacaaggggatccagagccttaagtaggggtaaagtagacccaagagatgtttctttgagctgagttatgaagtataagtagctattagccagataggaaaatgaagcgtgccttagattgtaaagtatgatcaagtgcatggaggtgtgatagcataagatttatgtgaactacaaagtgtaaatcgtgtgatggaacttggtcatagtttttcctagggtaggagtcagattaggaagggctttatttttcatcctaggaccttggatttaagtgttttttttgtttgttttgttttttttgagacagagtttcactcttattgcccaggctgaagtacaatggcaggatctcagctcaccataacctccgcctcctgggttcaagcaattctcctgcctcagcctccctagtagcagggattataggcatgcgccaccacgcccagctgattttgtgtttttagtagaaacaagggttctccatgttggtcagactggtctcgaactcctgacctctggtgatccgcccacttcagcctcccaaagtgctgggattataggcgtgagccactgtgcccagctagttttgttttttaaatttttatgtttccaaataaatcatacacagagcacaagtataaaacatagaaaaaaagatggagctgctttgacttggaatgtggagcagccagctttcttatcaccctcttgggtagcctacaaggggctctcatgagcactatctcagaggaacacaatttgaaaactacctctgtgatggaatttcaacagaaggattttgagaagtccagaggaattgattaactaatgattaattgtaaaatgcattcttagagttggaaataagttggtgtgatatgtgggagatggggaagggggccaatcaggtatgtctgggctattaagaaaattgttacttctattctttagtctattaagatataattaatatttttattttttatttttttgagacttgccctgtcgctcaggctggggtgcagtggtgtggtctgggctgactgcaatctccacctccaggtttcaagcgattctcctgccttagcctcctgggtagctgggattacaggcacctgccaacacgcctggctaatttttgtttttttattttttattttatttatttatttttttttttgagacagagtctcgctgtgttgcccaggctggagtgcagtggcacgatcttggctcactgcaacctccgcctcctggattcaagtgattctcctgcctcagcctcccaagtagctgcgattacaggcacatgccaccacgcctagctaatttttttgtatttttagtaaagacagggtttcagcatgttcatcatgtttgccaggctggtctcaaactcctgacctcaagtgagccgcccaccttggcctcccaaagtgctgggattacaggcatgagccactgcacctggcctactcaccgtttcaatgaatgtcataccttggtatctcgagggtcttgctatgttagtcaggctggtcttgaattccttggctcaagtgatccacctgcctcggcctcccagagttttgggattacaggcatgagccactgcctgtaaacttgtagtgactttgccctttgcttagtctgttaattactgagagaggtttttcccaccctgtgattataattttgttatgtgtcctggtatctcttgtttttctttttattatttatttatttattttatttatttgtttattttgagatggagtctcgctctgttgcccaggctagagtgcagtgacatgatctcagctcactgcatcctccgcctcccgggttcaagcgattctcctgcctcagcctcccaagtagctgggattacaggcgcatgccaccatgcctggctaatttttgcatttttagtacagacagggttttgccttgttatccaggctggtcttgaactcctgacctcatgatccacccgcctcggcctcccaaagtgctgggattacaggcgtgagccaccgtgcccggctgatgatgatattttaacagatgaagagttgcattttgtagatgagcaaaaaaatgtggtttcttttttttttttttgagatggagtctccctttgtagctcaggctggagtgcagtggtgtgatctcagctcactgcaaactccgcctcccaggttctcctgcctcagcctccctaatagctgggactacaggcacctgccaccaaagtacgagaatcacttgaattcgggaaggaagtttgcagtgagccgagattgtgccactgcactccatcctcggtgacagtgacagagcaagactgtctccagaaaacacccaaaaagagagaaagaagctctactgtgcataaaatactatcaaatggcattgaatgctacagagaaatcaggaaaggaagagtcaatcgtcaatccatgtgggaaacttcattatgggtttttttttggttttttttttttttttttggcaggttctcaccttgtcacccaggctggagcgcattggcacaatctcatctcactgcaacctccaactcgcgggttcaagtgattctcctgcctcagcctcctgaatagctgggattacaggtgcctgccagtatgcctggctaattttttgtagtttttgtagagatgaggttttgccatgttgtctaagctgttttgaactcctgacctcaagtgatctgccctccttggcctcccaaagtgctgggattacaggtgtgagccactgtgcttggctgcattgtggtcttactttaagaaattgctgtggtgggttctgtgctatttcctgtaatcccagcaccttgagaggccaaggcaggtggatcacttgagcccaggagtttgaggccatccggggaaacataaaaatttaaaaaattagccaggcgcagtggctcacgcctgtaatcccagcactttgggaggcccaggtgggcggatcacgaggtcaggagatcgagaccatcctggctaacacggtgaaaccctgtctctactaaaaatacaaaaaattagccaggcatggtggcgggcgtctgtagtcctagctactcgggaggccgaggtaggagaatggtgtgaacccgggaggtggagcttgcagtgagtggagatcgcgccaccgcactccagcctgggtgacagagtgagactccgtctcaaaaaaaaaaaaaaaattagctggtcatagtggtatgcacttttagtcccagttacttgggaggccaatgctagaggaccgctggaacccaggaggcagaggctacagtgagttgtttttgtcccactgcattccagcttgggcaacagttgagtgagactctgtctcagcaaaaacaaacaaacaaaaaacagaaattgccacagccattctgaccttcagcaagcagccatgaacactgaggcaagaccctccatcagcataaagcttgcagctcagatgatcattttttagagacagggttttgctctctttcccaggctcaagtacagtgataaaaccgtagcttgctgtaacctgaaaatcctggactcaagtgattgttttgcctagaactacaaggttgtgccagcacccccaactaagtctggctttgttttttcctcccctcccttcccctcccctccccgctttttaaaatttttattttatttttattttttcaaatgggatctcgctctgtcacctaggctggagtgcaatggcgcaatctcagctcactgtaaccttccatctcccgggttcgagtgattctcctgcctcagcctactgagtaactgggattacaggcgcctgccattacgcctggctaatttttgtatttttagtagagacagggtttcaccacgttagtcaggctggtctcgaactcctgacctcaggtgatccgcccacctcggcctcccaaagtgctggcattacaggcgtgagccaccgtgcctggcctctttttttgtttttttaagtaaagatgaggtctcacttatattgccaagtatggtcctgaagtcctaggcccgagcagtcttcctgccttggcttccgaaagtgctgggattacaggtgtgaacccccacaaccagcctcagttaaggggtaaaatttttttgtttgtttttttagtgatgagttcttgttatattgcccaggctggatattcttttcttttagcactatatattttttcccccaaatttatacattgaatacaacaaagcattcttaatttgttatttttaatatataatgctattgtacacagactattgtgtagtgtaaatctaacttttatatatgtattgtgaaattgaagcattctcgtgactcactttatcgcaatatttgcattgttgtggtagtcttgaaaccgaacctgtagtatctccaaggtatgcttttgcaagtttttgtatggacatgtgttttcattattcttgggtattgtatacctaggagtagagttactgcatcatatggtcattctgtgtttaagaaaaaattttattttcaatgtttgtgtatatatatttatgatatacatgagatattttggtacagacatgcaatatgtaataattacattagggtaaatggagttaccatcccctcaaggatttatcctttgtgttacaatctaattataccctttttcttattttaaaatatacagttaaattattatcaacctgttgtgctatcaaattctagttcttattcattatttctaacttttttttggacttactgaatcatctgttcttttgttttctttaaccgtcctcacttccatctttctacttcccttcctagcttctagtaaccatttttctgttgtctatcagcatgagttctattgttttaatttttagttcccactaataagtgagaacacatgaagttggtctttctgtgcctgacttatttcatctaacataatgatctccagttccatctatgttgttgcaaatgataggatctcattctttttcatggctgaataacactccattatgtatatgtaccacatttgctttatttattcatctgttgaacacttaggttatttccaaatcttggctattgtgaacagtgctgcaataaacatgggagggcaaatgtctatttgaaatactgatttccttttctgtatatagctagtcgtgggattgctggatcaaatggtagctctatttttagttttttgaggaacctccaaactgttgtctagatttgtactaatttacattcctaccaacaacgtatgagggttcccttttctccacatccttttattcttttcttttggataaaagccattttatctgtttgagatggtatctcattgtagttttgatttgcatttctctgatgatcagtgatactgagcaccttgtcatattcttgtttgccattcgtatgtctttttgagtaatttctattcagattttttgtccatttttaggaaaactttaatttgattgttatatttttcttttagatttgtttgatatcctcacatagtctagttacttgttttgggtttttttttctcttggagacagggtctcactctgtcacttaggctggtgtgcagtggggcagtcatggctcagtgcagccttgacctcccaagctcacgcatccctcccagtttaccctcccaagttgctgaaactacaggtgtgtgctaccatgtctgcctggtgtgggtgtgtgtgggtgtgtgtgtgcacgcaaggatgggatctcgccaaagttgatcttgaaatcctggcctcgagcgatcacccaccttggcctcccaaagtgctaggattgtgcaggcctgagccaccacgcctggccttttcttgtttataaatgagattatgtatttatacttgggttgatttgatgacgttattcttaaatatgggtagtttaagctgtggaaaagttttagtaggctttggatatcatataaatcaagcatctaaacggatgtgtttttgtcttatatattgctgtcgtctctttataacaacttaatattatgggagtttttggtaactaaaacaataactgagtccttagagttgcgataatttctatgataattgttatgtaaagcattagtacttcccccacttcccctcgtctttacctcaagttgtgtatcactatagattctcagcaagtttttctaaaaaactgtggctgggtgcagtggctcatgcctgtaatcccagtactttaggagggcgatttgggtggattgattgagctcaggagtttgggaccagcctgggcatcatggtgaaaccctgtctctacaaaaaatataaatgccaggtgctgtggctcacgtctgtaatcccagcacttgggaggcggaggctggtggatcacctgaggtcaggagttcgagaccagcctggccaacatggtgaaaccctgtctctcctaaaaatacaaaaattagccgggcatggtggcaggcgcctgtaatcccagctactcgggaggctgaggcaggagaatcgcttgaacccaggaggcggaggttgcattgagttgagattgtgccattgcactccagcctgggggatgagagcgagactgtctcaaaaaaacaaaaccaaatatatatttgcttttttgtttgtttttttgagacagagaccaaatatatattatatatatatataatatatatttgttttttattataatatatatacattatatattatatattatatatattttatatattatatataatatattttatatatttatatattatatatgtatattatatatatatatatataaatttatatatataatatataagttttatatatttaaatatatattatatattatatatttatataattaatatatataatatatttatatattttatataattatatatatttatatatataaataaatatatataatatagttatatatttatatataactatattatatattatatattttatattatataatttatattatatattatatattatatattttttatatatataatatataatataacatataatatatgttatatataatatattatatataacatatattatattatatgtatatttatatataatatatatatgtaaatcagcccagtgtggtggtgtgcgtttgtagtcccaactacctgggagcctgagggggaaggattgcttgagcccaggaggtggaagctgcaatgggctgtgatcacaccattgcactctagcctgcattacatagggagaccctgtctcagaaacgaaaaagaaaaaattgttgcactatggctattttttaatatttagctcaactgtaatttttggatatgtctgggaagagattgatagccaatgactatattcaatttacattaaaatagcatatcccatatgaccaggaacatagttgaaccggtttaggtttttttaaaaaatcctcagaagtgcaacataggtttgatttttaactgttgctagaaaaattcattagtgaaagtaaagatctcgtccaaaattcctttaaacagaacttttggctcaagagccacttcttagttagagttgtagagatgtcttaagcctttagtgattttcgaagatggtagtgacgagcttttctgggttagtttaatataaagtgatacgtcactgtcagtgaaataaggaatataaggtggccgtggtggctcaggcctataatgccagcactttgggaagacaaggtaggaggattgcttgagaccaagagttcgaaagcagcctggggaacacagggagacctgtgttctgggtgtggtggtgtgtgcctttagtcccagctattcgagtggctgaaatcaacgcgccactgcaccccagcctgggtgacagactgaggctgtgtctcaaaaaacaaaccaacaatcaaaaagaaaatgggaggttttaaatctagttagcttttaggttggatttaaacactttgcaaacaaattctagccatatttatttctaatgcaaaaaacatggtctttagagttattcagatatggatttaaattctaatcgttacaattgtgacttaacttttttttttttttttttttttgagctggaatctcactccgttgcccaggctggaatgcagtggtaagatcttggctcactgcaacctccgcctcccaggttcaagcgattcttctgcctcaacctcccaagtagctgggattacaggcacacaccaccatgctcggctaatctttgtatttttagtagagatggggtttcaccatgtttgccaggctggtcttgaactcctgacctccagtgattctcccaccttggcctcccaaagtgctgggattacaggcatgagccaccgcacccagcctgtgacttaacctttttgagcctcagtttctttatctgcaaaatcgagataatgctgtcttgtaaggttgtgaggggtaagcaaaataatgtatgtgtattagttttggggggctgttgtaatgcaataccacaaactagctggcttaaacagcagaaattctctctcagttcgggaagctagaagtacaaactcaagttgtcagcacattgttttgaggactgtgagtgtgtatctgtccctgtccctctcctaatgtctgacctcaggctttccttggttaatagattgtgttctgtctgtgttttcacgttgtcttccctctatttgtgcctgtctttgtttccaaatttctccattttattaggaaacagttgcactgaattaaggcccacccttgtgacttcatctggatcaactgcaaagaccctactttcaaataagatcacattcacagctactgggttagggaggagtatatcttgtgtgtgtgtagagtggcagtgtacacagaattcggcccaataccatatataaaaaaggcttagtaccagtatattatttccaactggacctatagacattagaaaaagccattctgaaatctgccagtcctgccagtctaagcctggaagatgccacttctttacttacattttctctgatctcttttcccaagtgtcttgggatctggaattgtgacttattcgtctttgtgtgtcttgttgagctttgtacataggtgtttactaagtttgtgtgtagttgaattatgggcttaaatggatttattttagtgtctgtctctgcaagataaaatttttaagctggtcttaaagtcgtcttgcttttttacacccttgttcttattttcatgtttagaagcttttctgtggtctggaattcttgcctgtttctaagtttatttattaagatcagttggatttggtccttattgtctatgaacgaaagtattaatgtgtatttatatagatttatttttccagtgggtttgcatatgttattttatttggtcatgtaaatttttcaagatagaagaaagtaaataggggtttgttaaagtctttactcattgtaccatcaattaatgaaactttaaaatttgtgtttctcaatggccttgttatttaaaagtttttttaaggtcatcattattgcttcagcctagtttataatggatcatacagtgtatgtatagctctgttatctttaagatatgacatcttagcatatttcatagagttgtaatagcataattttttttggttatatagatgagaggtttctgtgttggccaggctggccttgaacgcccagcctcgcctccttatgcaccaggacaacaggcctgagccaccacggctcctagcataatttttttaaacagatctcttggtggatattaacttttgtcattttaaaaaaaaaatgctttaacagcttgggcaacgtggttatattccatctctacaaaaaatacagaaattttccaggcatgttggtgagcattggaacactgagatgggaggatgggttgagctcaggaggcgaagattgcagtgagtgaagattgcaccattgcactccagcctgggaggcagagtgagaacctgtctcaaaaaaaacacacaaaaaaccaaccaaacaaaaacctgctttaaatatcttaccctagaattaggaattataggaaattactttgaattatttttggggcttaaaatactgggagctgaattactagttactcattttgatggtgtattatagagtaggtgttactttcccaattttgtggcttaggaaactgagaccaaattaacagactttttgaaggtgacacagtttgtgatggagtcagaagagaggatttattactactttctctggttctgtggttctggctattgtctttacctgataccactgacattctttctcctctgtctattgaatgcatgtattttatgattatacttccaaaaatacaatgtaatctttttgtagtagttctctgaggagaagacagaaccaacaacatgtgctagattggttatagttaaatttgtcataaagcatataataataatgaggttttgttgttattggataacaggagagtggtttaagaatttaggctctggagttgtatctccccaggtttgaatccttggttctgtcacttaataactatgtaaccacaggcatgtagtaaaataatgggtaataatgtgtttacttgaagaacagtgccttgcatgtagcaaacatcatgttacttaatgtatttgaagtcatttaggacttgaataaataagcaagttccatatttagcagtgccaaataaatcatatttaaataatcaaaaatcaaattatataataaatttattggaacctactcagattgcagttttcagtacagataaaatatttgtctttcccatcgattcttggtatctcttaaagtttcaaagtcaattaactttgaagtcgtattctttttgagaatttacttgataaccatcaatatggtcccttagatttttttaaagacagatctcactctgtagcacaggctggagtgcagtgggcatgaacatggtccactgtagcctcgaattcttgggctcaagcagtcctcctacctgtctcccaagcagctgggagtacaggcatgcaccaccatgcccagctaattttttaaattttttgtagagactgggtctgacatgttgtccaggctgatctcagactcctaggctggagtgatcctgtcacctcagcctcccaaagtgctggaatttataggcaagagccacagcatctggcccccttagggctttttattttattttattctttttacttttgaggcagagtctaactctgttgcccaggccggcgtgcagtggcgcaatcttggctcactgcaacctctgcctccctggttcaagcaattctcttgcctcagcctcccgagtagctgggattaccggcatgcgccgccatgccctgccaatttttgtatttttttctctttttagcagagacagggtttcgctgtgttggccaggctgatctcaaactcctggcctcaagttatctgcctacctcggcctcccagagtactgggattacagatgtgagccactgtgcctggccccttagagctttttaaaagaaagtaagatgtagttcttgtttcattttctagtagctctatatacaggaggaactaatcccaggttttttttttttccgagacggagtcttgctctgtctcccaggctggagtgcagtggcgccatctcggctcactgcaagctccgcctcctgggttcacgccattctcctgcctcagcctcccgagtagctgggactacaggcgcccgccaccatgcccagctaattttttatttttagtagagacggggtttcaccgtgttagccaggatggtctcgatttcctgacctcgtgatctgcccgcctcggcctcccaaagtgctgggattacaggcatgagccactgcacccagccttttttttttttttcttttttttttttgaagagtctctctgtcgccgaggctaaagtacggtggctcttggctcgctgcaacctccgcctccagggttcaagcgattctcctgtctcagcctcccaagtaactgggtaggattacaggtgcccgctaacacccccggctaatttttgtatttttagtagaacaaggtttcaccatgttggccaggccggtcacgaactcctgacctcaggtgatccacctgcctcggcctcccaaagtgctgggattacaggcatgagccactgtgcccagccaatcccagtatttttaatgagatttaacttctgtgagtatttagaagaattctttgctgttttctctggggcttatgtctgaaagtaaagtgttagctgggactacaggcatgtgccaccactcctggctattactattgttaatacgctaatagaaatattggtttgaaaagcatgtagaatatcacatgcagaagggtctgaagtctcttgatattattaaaaattcttcctataattttttctccattttttttttccctttgtgttttgatccaaggactagatcaagggtgtcttttccttcggatgattttctttattgtgtgtgtttttagttctttaaaaataaagccagcttaattttattttcaaaatacggatagattcattatataaaacaattataagttgagaactatgtataaagggctatgttatgaacaattaagatggaataatttagttgtacttattttgtaattctttttaggctagagtgttttcattctcaatttttcatacattgctttttcagaaggctaataggaatgacaataatgtttcaaaatattttgattcttattgatgccccatgttttgtctgtctaaagtgtcaacctaagaaaaagtctacgccactgaagtatgaagttggagatctcatctgggcaaaattcaagagacgcccatggtggccctgcaggatttgttctgatccgttgattaacacacattcaaaaatgaaaggtaatacttgcagtgattatacatgttaaaggcagttgcctttagaataactcaatttttgttatcttaataataatatatttttttccttggaacattttgtgaatgaattggtgttacatattttatcttttggggcttttaaaagttcgttttactctatgatttaaaccttctctcagttttttttttttgtttgtttgtttttgagacggagtctcgctcttgttgcccaggctggactgtagtggtgcaatctcagctcactgcaacctctgacttgtgagttcaagcgattctcctgccttagcctcccgagtagctgggattacaggcatccgccaccacgcttggctaatttttgttttttgtttttttttttaattttttatttgagatggagttttgctcttgttgcccaggctggagtgcagtggcgtgatctcagcttaccgcaacctctgcctcccgggttcaagcaattcttctggctcagcctcctcagtagctgggattgcaggcatgtgccactacgcccagctaattttgtatttttagtagaaacggggtttctccatgttggtcagactggtctcgagctcccgacctcaggcgatctgcctgccttggcctcccaaagtgctgagattacaggcatgagccctgcaccaggcctaatttttgtatttttagtagagacggggtttcaccatgttggccaggctggtcttgaactcctgagatgaggtgatccgcccgccttagactcccaaagtatggggattacaggcgtgagccactgtgcccggctgatttaaacattctcaattattctgttgatgccaggaaggtgttaggccatttttctaatgtttacattgtccggaatcaccttttagtatatttacgtatttctactttaatcaggtttgtatcattttttataatataaaagctgaaacaattgtaaatgtttattaataattttgaagtttaaaattttaatttggagtatttcctttaaatgctattgtttgtttttcagttgattgttgtgtttgaatcttaggtaccttagttttaaattactctaaaggatggggctgaaacttgatttatttttattttattttattttagagaagaatttctgctctgtctcccaggctggagtgcagtggcgtgatctcggctcactgcaagctctgcctgctgggttcatgccattctcctgcctcagcctcccgagtagctgggactacaggcgtccgccaccatgcctggctaatttttttggtatttttagtagagacgggatttcaccgtgttaaccaggatggtcttgatctcttgacctcgtgatctgcctgcctcggccttacaaaatgctgggattacaagcgtgagccaccgtgccgggccaatttttgtatttttagtagagatggggtttcaccatgttggccaggctggtcttgaactcctgacctcaggtgatcctccttcctcagcctcccaaagtgttgggattacaggtgtgagccactgcacctggcctgaaacttgatttgagctgtccttttttctgttaggatggtagtgattttattttagttttaatatatgtattttagtttctgaaagtcagatgttggtgagattcagaaaaatcagcttactctctgctttgctgtgatccgccacattcttcactcctttcaacaggcaaccaattgatattaatttttgttgttgttgttgttgttttgttttgagacggaatcttgctctgtcacgtacgttggagtgcagtggcgcaatttcggctcactgcaacctctgcctcccgggttcaagcaattctcctcctgcctcagcctccagagtagctgggattacaggtgcgtgccaccatgcccagctaatttttgtattttagtagagacggggtttcaccatgttggccaggctggtctcaaactcctgacctcaagtgaaccacaggtcttggcctcccaaagtgtttggattacaggcgtgagccaccacacctggctgatattaatatatttttatatacataatgttttttcatataaattatatttttatttacatgagtaaatacatacttcttagtcatcttccacgtctttcctttatcacaaacagaacattgtatattttgcagcttgccttttccactttgtggagatttttttcatatttttattatttatgtatttgtttatttttctgagacaggatctcattctgttgcctaggctggagtgtaatggcataacaacgcctcactgaagccttgatctccagggctcaaacagtcatccaacctcagcatcctgaatagctggaatagctggaatagctgggagcacagacgtgtgccaccacacatggctttttttttttttttttgggtggagatagtgtctccatatattacccaggctggtcttgaaatcctgagcttaataagggatcctcccaccttggccttccggagtgctggaattacatgtgtgagtcaccatgcctctttttttttttttttttttttttaaaaaggatgatttctccaaagtagaattcctggatttgattttatattttgaataatgaggtgcccaaaaacctttataaattttagtgtctttttttttttttttttttttttttgaggcagagccttgctctgtctcccaggttggagtgcagtggcacaatctcggctcactgcaagctccacctcctgggttcacaccattctcctgcctcagcctcccgagtacctgggactacaggtgccagaacctagcacagtactaggttttgtgtctgggcgcagtggctcacacctgtaattccagcactttgggaggctaaggcgggcagatcacctgaggtcaggagttcgagaccagtctggctgacatggtgaaaccctgtgtttactaaaaatacaaaaattagccaggtgtgttggcatgctcctacaatcccagctactggggaggctgaggcagaagaattgcttgagcccgggatgtggaggttgccgtgatccaagatcacactactgcactacagcctgggtgacagagcgagactctgtctcaaaagaagaaaataacttagtgtgttaaaaatttaataccttgaccagacacggtagctcatgcctataatcccagcactttgggagtccgaggtgggaggatcacttgagcctaggagtttgagaccagccttggcaatacaatgagacactttctctttaattcaaaaaaaatgttgataccttatcctttgtgacctgtctggatatttaaattctactactagaaaactctgagtccttcttttctaacctccctgtccctatgactgctggtttcttactcattagggtgtctctctctctctctctcctcgtctctcttttgattgagggtctcgttctattgcccaggctagaatgcagtggcgtgatcatgactcattgcagccatagcttcccagggtcaagcgatcttccctcctgtgccttccaagcagctggggctacaggcattcgccactatgcctggcttagtttttaatttttttgtagagacagggttttgccttgttgcccaggctggtctgaaactcctgggctcaagcgatctgcccgcctcggcctcccaaagtacttgggattactgacaggagctaccgcactcagcctatttatagtgtttcttatgcatactagttgagtccatgctatttatttgacaaatagtaaataccttgtatagattgagtactgtgctaggttttgggattcattattgggccatacatctatactgcttgctctcatgagaaattagaatctagtataagggacaagacaccagaaaataatcaaatgcattattacttaactgagaagtctgtccaaggaacaattttgatgcctattcagtgatataacagggataactgacctggactcttcatcagtggtgtttgctaataaagttatctctgatctgttacttgagaggatgagttgggagttaactagggaagagagaagaagatggttccaggaatctgcagctcacagagtaagggagggtggcacagtatgaggctgggaagtagatatgggacaaagtgttcagtgccttgttgactttgttaaaaaattttgttatttttatctcagaaacaatgtatataattaaaaagtgtttagcaggagccgccatgctctgatctgttcattttaaaagttcactgtggctggattgttgaacatgtgttagaaggggaccacaaataagtaaaaagagacagttaagtcattattagtgattatggtgtgatgaaaattgcgaatagaaaataaaaacagatgaggaggtaaaatgcatctgatgtagtaatgcattggataatgttgactgagggagaatgaagtcctgaggctttcagttctcaggtttccatatcataggatggctcccacgtttttagcttcatcactggatggctgaatagatcgtcatttactgagagaacaccagagcatctataactcagaaaggacatattcttgttcatattagttggagccatgggcaaggcatgggtgagattttttgggacaaaagatactatgagacaaaaggtacattgaggaagacatcatttgacatctgtatgaaagagactgagcttgctgaaaaagaatgatgaaaaagaatcagatgaaacaggtggaagaggaaaagtaggagaatgtggctagagtacagtagtatgtactggggatatgttctaagattctcagtggatgcctgaaactggatagtactgaatcccatatatataatgtttttcctgtacatacatacctattataaagtatcatttataaattgggcattgtggctggttgtggtggctcacgcctgcaatccagcactttgggaatccgaggcgggcggatcacttgaggtcaggagttgaaagccagcctggccaacatggtgaaaccctgtttcttctaaaaacacacaaaaaattagctgggcgtggtggtggatgcctgtaatcccagctactggggaggctgaggcaggaggattgcttaaacttgggaggtggaagttgcaatgagccgagatcataccactgctctccagcctgggcaatggagcaagactccatctaaaaaaaaaaaaatagtaaataaaaaataaattgggtattgtaagagatcagtaacaactaataataaaacagggcgggtgcagtggctcacgcctataatcccagcacttcgggaggccgaggcaggcggatcacaaggtcaggcgatggagaccatcctggctaacaaggtgaaaccctgtctctactaaaaatacaaaacattagctgggcagggtggcgggcgcctgtagtcccagctacttggcaggctgaggcaggagaatggtgtgaacccgggaggcggagcttgcagtgagccaagatgacgccactgcactccagcctgggcgagagtgcgagactccatctcaaaaaataaataaaacagaacaattacactgtaataaaagttatgggaatctgtcccctaccttcgaccccaatagcttattttactgtatcacaggtaactgaaaccatcgaaagtgaagtctcacgtgagctgggaccactgtagtttaaggacgatgtggtcaattttgctgagtgttgcctagagagcaaataaaatgtccattagggataagaaggtggagatcacgagtaccttttttgttgttgttggtttcattgaggtagaagttagattggactgatttgaggcaatggagacagagacagagaagggaggatgctgcaggcagataggtatataggattcagaaggatttttattttttgttgttattttttattttaatattagtcttatttttgagaaagagtcttgctctgtcactcaggctggagtgcagtggcacaattacagctcactgcaacttccatctcccaggctccagtgctccagggctccagcactccttccacctcagcctcctcagtagctgggactacaggtgtgcaccacaacacttggctaatttttatattttttgtagagacaagatctccctatgttgcatgaactggtcttgaactcctggccttaagtgatcctcccgccttggcctcccaacgtgctgagattacaggtgtgagccactgtgcctggccaatttatttttgactctagagacagggaagtttcaagatgaaggtgctagccaattcggatcccaagtgagggctgtcttcctgacttgtagataaccaccttgttgctgtgtcgtcatttggcagagagcgaaagtactcactgtggcatcttcttttaaggagactagttgcatcatgaggtcacctccatcatgagggacctattactaatctagtaatagtatttagtattcttagtatatttagtgtataaaattagtaaatctacttactccaaaggcctcacctgtaaacaccaacatatgggggggtcaaggcttcagaataatgcatttcaggaggacacaaacatttagtctgtaatagccctttttcatccttcttgaatgacagtcttactaactctgagttttaaattgtcgtcagtaagctgaattcatatccttagtgatagtctttatccaggctttagatttgtatactcaactccatacttgaagttttcaccaagatgtcaatttgaaaatatattcatcaccctaacatggaaccccatactctttagcttcctctgtctccatctttccacacccatacgtgtttgccttaagcaaccactaatgtactttctgtttctgtggatttgcatattctagacatttcatatgtagtaggtccccaatttgagttagaatttttcgaccttacaatggtgcgaaagcgatacacattaaatagaaatggtacttcaagttacctgtagaaccattctgtttttcactttcaatgtagtattcagtaaattacaggagatattcagcagttaattttaaaataggctttgtgtcagaaatattgcacaactgtagaccaatgtaagtgttctgagcatgtttagcgtaggctaggtgtattaaatgcattttctaattattattttttttttagaggcagggtcttgctttgttgctcaggctggagtgtagtgacgcgatgtcagctcactgcaacctctgcctcttggactcatgtgattctcctgcctcagccccccaagtagctggaactacaggcaagggccaccatgcccagctaatttttaaatttttttatagacagggtctccctgtattgcccatgcttgtcttgaactactgggctcaaacagtcttcttgccttggcctcaaaaagtgtttggattataggcgtgaagcctctgcgtctggccagccttcatattcaacttaatattttcttttcttttcttttcttttcttttctttttttttgagatggagtctctctctgtcaccagactagagtgcagtggcacgatctcagctcactgcaacctctgacatcctggttcaagcaattctcctgcctcaacctcctgagtagctgggattacaggcacctgccaccacgcccggctaatttaatttttagtagagacggggtttcaccatgttggtcaggatgttctccatctcctgacctcgtgatctgccaacctcggcctcccaaagtgctgggattacaggagcgagccaccacgcccggcctcaacttaatattttcagcttataatgggtatgtcatggagcatctgtgatttgtttataatttttccacaaatctgttgtgctcctcaacttacaatggggatacgtttccactaggaatgcattggttctgatttttcccatatccccatcattggttatttgacttttaaaaaatagacaaaacataaatttaatgttttttttttgttttgttttgttgagatagagtcctgctctgttgcccaggctgtggcaggatctcagctcactgcaacctctgcctcctgggttcaagcagttcttctgcctcagcctcctgagtagctgggactatacgagtaactgggactacaggcatgtgccagcacgcctggctcatttttgtatttttagtagagacaggatttcaccatgttggccaggccgttcttgaactcctgaccttaagtgatcctcccgcctcggcctcccaaggtgctgtcctgcctcagcctcccaaggtgctgggactacaggcctgagtcacctttcctcgcctaatgttttcattgtttcaagtaggcagttcagtagcattaagtatattaacattgttgtgtagccattaccactattcatctccagactctttcatctcccaaactgaaactctgtacccatttaccaacatcaccatagcccttggtaaccactgttctgtgttttttttccttataaatttgactattttagataccacatataactagaatcagacatttgtcctattgaccccttacttcatttatcataatgtcttctaagttcatcaatgctatagtatgtttctgaatttctttctctctctctcaatttttttaaaggctacataatacgtcattgtattgtaagtaccacattttgtttttccattcatccatcagagaacatttgggttgttttccttttggccattctgaacagtgtttctataaacattgtatagtatctggtgtttttgtatttttttttttttggatggagtttcactcttgttgctcaggctggagtgcaatgaggcgtgatcttggctcactgcaacttctgtctcctgggttcaagtgattctcttgcctcagttgggattacaggtgcataccaccacacctggcattaatttttgtatttttagtagagactgggtttcgccatgttggccaggctggtctcaaactcctgacctctggtgatctgcctgcctccacctcccaaagtgctgggattataggtgtgagccactgtgtccaacctaagcatctgtgtcttttttgttgttttttatttgttttttgagacagagtcttgctctgtctcccaggctggagtgcagtagcgggatcttggctcactgcaacctctgcctcctgggttcaagcgattcttctgcctcagtctcccgagtagctgggactaaaagtcagctaaaagtcaaagctgtaatggctaagatcttaacatgccatgcaaactcttacaagtctggttgctgcccaacctttattagtttcccttttcttctagtttatgatagtgtttagaactacttgtagttttgtttagttttattcattcatgcctttgagggttctgtgccctcatactataattctatctttaactgtttacttttttttttttttttgagatggtgtctcactcttgtccaggctagagtgcagtggtgggatctcagctcactgcaacccccgcctcctgagttcaagcgattctcatgcctcagcctctcaagtagcttggattacaggcaagttgcaccacgcccggctactttttgtatttttagtagagacagggctttaccatgttggccaggttggtcttgaactcctgacctcaggtgatccgcctgcctcagcctcccaaagggctgggattacaggcatgagccatcccacctggccaaactgtttaactttaaaagttgttcagcctggcgcggtggctcacgcctgtaatcccagcactttgggaggccgaggcgggcggatcacctgaggtcggcagtttgagatcagcctgaccaacatgaggaaatctcgtctttactaaaaatacaaaaaattagttgggcgtggtggcgcatgcctgtagttccagctacttgggaggctgaggcgggagaatcgcttgaacctgggaggcagaggttgcagtgagccaagatcatgccatagcactccagactgagcaacaagagtgaaactccgtctcagaaaaaaaaaaaaaagttgttcaagtacttcatttgtctcctcccacttataattgagtggttttttttaagaaataagtgtttatttttgcagttgtcatgccttttgtactgtaatcatttatatatgacttatctgtcagacagtgagttcttttttctcctcacgttgctggcacatcagaagttcttgatctgttaatgaaatttatttatttatttatttctaagacaggggcttgctgtactgccagggtggagtgcagtggcgtgataatggctcactgtattcttgacctttgaggatgaagtgatcctcccttctcagcctcccaaatagatgggactacaggcacatgccaccatcctcagccagtatttttatttttagtagagatagggtcttgctatgtttcccaggctggtctcgaactcctgggctcaagcagtcctcccacttctgcctcccaaagtattgggattacaggtgtgagcccctacacctggccagttcaatgtattgactcatgggagagtgatttaattctcaaattgactttaagaacctctgtataggtacacacatgtgtatattaaccagttccagttcctgtaggtgatttttattgaaggatttaattcagtaggtgggaaataaggagttcattttttttttcagtttgtttttaaaatgaaccagacaacacaaaatttaactaagttttagtttcattattaagctatgttttttaatagaaaaactaccatgtgtacacttttgaaaccagcatttacagagaagttaccgttgacagttcagtttataaatcccttctctcctttgtctttcttttttcatttttcattttgcattctgagggaagtaggcattccataattcttccaaaggttatttggattcttttctgtgttttgaaataagacatggttgttacaagggaactagatgtgagttaaaatgaattttcgtataaaatgatttttatttccttttattaaaagtgacaaattgttaaacatgtgttgtcctgactttcttttgtgacactttttagtgtaataaaagttgctaataaaattgtaaatgtgtggaagataacatatactagatgaattataatcttttctagatgggatttgtattttcatatttttaattgtatgtatagaactttagataaccaagaaattataggctaaactggatttatttttggttttattactggtaggctttcctttttcttttaaaatttccctaatttgaaatattgcatttcactttctttgcaaaaccagtgtttgaccatgcgcttgttctctctgaagttattgaacttactatatctaaaataccaaaaccatacattattttgggggtgtggttgtggggaggaatccatgcaaagcaccttgtgtggtgctcgtctatgagtagctacactataaatgttaacagatcatacatgttgctttgctgaaacatttcttcttctttatattagcctagtgtttttcacgttttcttgggtttttttttgtatatatatttttgttgctgtgggcttactatatacatcttctgtatttttggaacaatgaaattatagactgatagtgaaggaaacttacctgtctactatcttaatttcttctttgtagttaatctacatttagctggttttgaagctataccacgtcatcagactagactactgattctttcataacctcctgtgtattttcttgccacacatatataatacttaaaattttccttgtgtatgatctattctaggttgtctagttcagtgggcatgttagttgtttccagacagtcttctttggcggcaatgatgtggctgttctcttaatgatgagaagtaatttctttgatctaatgattctggttctcttacccttacctagtttccaaccggaggccctatcggcagtactacgtggaggcttttggagatccttctgagagagcctgggtggctggaaaagcaatcgtcatgtttgaaggcagacatcaattcgaagagctacctgtccttaggagaagagggaaacagaaagaaaaaggatataggcataaggtaggaaacgaaaaaggctttttattgagtgacagaagcaagtaagaaaaagaaagaaaatggcctcttatttattttcgagacagaactttgctctgtttcccagattggagtacagtggtgcaatctttgttcactgcaacctccgcgtcccaggttcaagtgattctcgtgcttcagcctcttgagtagctggtattataagcgagcaccaccacgcctggctaacttttgtatttagtagagacaggatttcgccatgttggccaggttggtcttgaactcctgagctcaagcagcttcccaaaatgctgggattacaggtgtgagccactgtgcctggcccggccttttaaaaatcattatctacttgggagttagcagagaggaggcagggaagaagcattatatttttgaaatgtaagttatttcctttggtagtagaatatctgtgagaaaagagctagggagcagatgcaggtgggttttttttgtttgtttgtttgtttgtttttcctccccagtgggctggggctagcttgtgacatatttatactaaattttttgataaattattttagtcaactttactgtgtcactcagtagtgaaaattatgacatagcgtgaccattcttttgttatcttttatgcatgatgaaagtatcattaaaatgaaatattctgcttcttgccacttggactaattatttctgttaatgagaataatgtggtttttttgtttgtttgtttctttgtttttggagacagagtctcactctgtcacccaggctgaagtgcagtggcacactcttggctcactgcaacttccgcctcccaggtttgagccattcttgtgccttagcctcccaagtagctgggattataggtgcccgccaccacacctggctaatttttgtatttttagtagagacaggttttgccatattggccaggctggtcttgaactcctgatgtcaggtgatcaactcgcctcagcctcccaaagtgctgggattacaggcgtgagccactgcgcccactgagaaccataaagtttttaataattttcttttttatgtttgtcagtgcttaagtctaaagtttctactctagttatatttcaaccatcagtattgtggctttttttcttttgcttgatgttttatgttaaatttggctgagaaaaataccagcttattttaatactcttttttcctccagttttttttattgtgttaaaatatatataatataaaaattactatcttaaacacttttaagtgtacagttaatggttttaaatacatttataatggtgtgcaaacatctcataattattttcatcttgcaaatctgatactcttttacctgttaaacagtaattccccatttgtccttctcccatcactgtcaccaccattctactgtttgtctctatgatttaatattctcttatattcaattctagaaggagaaataataattcttagtttggtgttttatactcccctgggtctaaatacttttatttattattattattctttgatacgggggtctctctatgttgttcatgctagagtgctgttgcacagtcatcttttactgcagctatgacctcccaggctcgagccattctcctgactcagtctcccgagtagctgggactacagatatgtatgactacagtggctaatttttatttattattattattatttttttaaacagagtcttgctctgtcacccaggccggagtacaatggtacaatcttggctcactgcaacctctgcctcctgggttcaggcgattctcatgccttagcctcccaaatagttgggattacaagtgtatgccaccacacctggctaatttttgtatttttagtagagacagggtttcaccatgttggccaggctggtctcaaactcctgtcctcaagtgatccatctgccttggtttcccaaagtgctgggattacaggcatgagccactgtgcccagccccaatttttatttttatttttttgtagaacgacaaggtcttgccatgttgcccaggctggtcttgaactcctggacttaatcttctcatgtcggtttcccaaagtgatgggattacaggcatgagataccatgctggcaatacttgtagactatttttaaaaatcataattaggataatttagagttcatatgcagggtctgccacttaacacttgagttctcaaagacttggtgtcttcatctctaaagctagtacaataacttacaccctatagaactgttgtaaacattagaaataagtataaaatacttaatatgacatacaattgatgctttagaaacaattagtatgtgttgttaggatgaaagaggttaacggcttcctttcagatatttcagctggttgctgatagggatgtgtcggttattttgttaagtctttaggtacgtagagttaccaatctttttagaggtgtttattggggctttcagattctggaaaattgatttactctggtcacagtcatgagcattagtggatatgtgtttctgtgcttaaaaaaaaaaaaatacacactaccagattgtccgtttgatcctttctttaagaggaggctactcctctagttaccctaattttttttttttctttttgagatggagtctcactctgtcgccccagctggaatgcagtggcatgatctcggctcaccgcaacctctgcctcctgggttcaagcaattctcctgcttcagcctcccaagtagctgagattacaggcttgcgccaccacgccctgctaatttttgtatttttagtagagacagggtttcactatgttggccaggctggtctcgacctcctaacctaaggtgaccccccgccatccccccgaccttggcctctcaaaatgctaggattacaggcgtgagccactgtgcccggcctcgttaccgtaattatttattttttaatttatttatttttatttatttattttgagacagagtctcgctctgttgtgcaggctggagtgcagtggtgcgatgtcagctcactacaacctccgcctcccgggttcacgccattctcctgcctcagcctcccgagtagctgggactacaggtgtccgccaccaggcctggctaattttttatatttttagtatagacggggtttcaccatgttagccaggatggtctcgatctcctgaccttgtgatctgcccacctcagcctcccaaagcactgggattgcaggcgtgagccaccgtgcctggcctatttatttaaatttttttttttttttttttttttttttttagagaaggggtgggtctccctgtgtttcccaggctgggctaaaggcatcctcctgcctcagcctcgcaaagtgctgggattaaaggtgtgagccactccacgcagccttttattcatttattttattttttaaaatttgagacaggatcgtgctctgtcatccaggctggagtgcagtggcacggtttcggcacactgcaactttcacctcctgggcacaaatgatcctcctacctcagcctactgagtagctgggaccatatgcatgcagcatgtccagctagtgtgtgtgtgtgtgtgcgtgtgtgtgtgtgtgtttttagtagagacagggtctggttgtgttacccaggttggtcttgaactccagagctcatgtaatccacctgcctcagcctctcaaagtcctgggagtacagccatgagccaccatccccagcaatgatctgaatgtttacttgctctgcagaacatccccttcacaaatattaaactatttgtgaacactatgtggtagttagaatcttgactaatacctattgtatggaggtaaggaagaaaataagagtctgaaaaattagctgtatttcagagtctcaatgttttcatgctgtgaggtatccagaaaagataatgtaatacccatggtgtcatcagtataatagctctggattacatgatgaagcctaggagatggcttggttataatccaggttatatttaacatttatagtcgattcttgattagccaggtggctagtgataactagaatttcaaatttcaagttccctagggaggtagatcaaacctgctgattcctcttatcctgttttttctatattcatcatctttaacctttttttctttttcttttttttttcttggtttttctttttctttttttcttttcttttttctttttgagaaagagtcttgctctgtcacccaggctggagtacagtggcgtgatctcagctcactggagcctccacttactgggtacaaatgattctcgtgtcttagcctccctactttcttttttatgcaactgaacatgtgtttggccttcatattccttaattaattaattaattaattaattttttgagatggagtcttgctctgtcccccatgctggagtgcaatggcgtgatctccaactcccgggtgctagtgattctcctgcctcagcctccacagtagctgggagtataggtgtctgccaccacacctggctaatttttttatttttagtagagatggggtttggcgatgttggccagggttgtcttgaactcctgacctgaggtgattcgtcctcctcagcctctgaaagtgctgggattacaggcgtgagccacacacccggccaagtattctttaatttagaaatgtaatgttaccagttttagtctatattctgctttgtgcttataaatgcagggagggtggagtgtttgtgagatcagtccttactctaatgacataatcttattagcagaagtatttttgaggaagctccattagggtgattcagatgctgcttgagctcaggtgctaactacctggctggttccataaaagcaggaggcctgacaggtttgtaaaagcttctgatttcaggccgggtgcggtggctcatagctgtaatcccagcactttgggaggctgaggtgagcggatcacttcaggtcaggagtttgagaccagcctggccaatatggtgaaacccctattctactgaaaatacaaaaaattagctgggtgtggtggcgggtgcctgtaatcccagctactcgggaggctgaggaaggagaatcacttgaacccgggaggcagaggttgtggtgagcgaagattgtgccactgcactccagcctgggcgacagagcaagactctgtctcaaaaaaaaaaaaaaaaggaataaaaaaaaaagcttctgatttcatctcccttttcccccacccatttctttgataagtgataattctttttctcctttaaatttaaggttcctcagaaaattttgagtaaatgggaagccagtgttggacttgcagaacagtatgatgttcccaaggggtcaaagaaccgaaaatgtattcctggttcaatcaagttggacagtgaagaagatatgccatttgaagactgcacaaatgatcctgagtcagaacatgacctgttgcttaatggctgtttgaaatcactggcttttgattctgaacattctgcagatgagaaggaaaagccttgcgctaaatctcgagccagaaagagctctgataatccaaaaaggactagtgtgaaaaagggccacatacaatttgaagcacataaagatgaacggaggggaaagattccagagaaccttggcctaaactttatctctggggatatatctgatacgcaggcctctaatgaactttccaggatagcaaatagcctcacagggtccaacactgccccaggaagttttctgttttcttcctgtggaaaaaacactgcaaagaaagaatttgagacttcaaatggtgactctttattgggcttgcctgagggtgctttgatctcaaagtgttctcgagagaagaataaaccccaacgaagcctggtgtgtggttcaaaagtgaagctctgctatattggagcaggtgatgaggaaaagcgaagtgattccattagtatctgtaccacttctgatgatggaagcagtgacctggatcccatagaacacagctcagagtctgataacagtgtccttgaaattccagatgctttcgatagaacagagaacatgttatctatgcagaaaaatgaaaagataaagtattctaggtttgctgccacaaacactagggtaaaagcaaaacagaagcctctcattagtaactcacatacagaccacttaatgggttgtactaagagtgcagagcctggaaccgagacgtctcaggttaatctctctgatctgaaggcatctactcttgttcacaaaccccagtcagattttacaaatgatgctctctctccaaaattcaacctgtcatcaagcatatccagtgagaactcgttaataaagggtggggcagcaaatcaagctctattacattcgaaaagcaaacagcccaagttccgaagtataaagtgcaaacacaaagaaaatccagttatggcagaacccccagttataaatgaggagtgcagtttgaaatgctgctcttctgataccaaaggctctcctttggccagcatttctaaaagtgggaaagtggatggtctaaaactactgaacaatatgcatgagaaaaccagggattcaagtgacatagaaacagcagtggtgaaacatgttttatccgagttgaaggaactctcttacagatccttaggtgaggatgtcagtgactctggaacatcaaagccatcaaaaccattacttttctcttctgcttctagtcagaatcacatacctattgaaccagactacaaattcagtacattgctaatgatgttgaaagatatgcatgatagtaagacgaaggagcagcggttgatgactgctcaaaacctggtctcttaccggagtcctggtcgtggggactgttctactaatagtcctgtaggagtctctaaggttttggtttcaggaggctccacacacaattcagagaaaaagggagatggcactcagaactccgccaatcctagccctagtgggggtgactctgcattatctggcgagttgtctgcttccctacctggcttactgtccgacaagagagacctccctgcttctggtaaaagtcgttcagactgtgttactaggcgcaactgtggacgatcaaagccttcatccaaattgcgagatgctttttcagcccaaatggtaaagaacacagtgaaccgtaaagccttaaagaccgagcgcaaaagaaaactgaatcagcttccaagtgtgactcttgatgctgtactgcagggagaccgagaacgtggaggttcattgagaggtggggcagaagatcctagtaaagaggatccccttcagataatgggccacttaacaagtgaagatggtgaccatttttctgatgtgcatttcgatagcaaggttaagcaatctgatcctggtaaaatttctgaaaaaggactctcttttgaaaacggaaaaggcccagagctggactctgtaatgaacagtgagaatgatgaactcaatggtgtaaatcaagtggtgcctaaaaagcggtggcagcgtttaaaccaaaggcgcactaaacctcgtaagcgcatgaacagatttaaagagaaagaaaactctgagtgtgcctttagggtcttacttcctagtgaccctgtgcaggaggggcgggatgagtttccagagcatagaactccttcagcaagcatacttgaggaaccactgacagagcaaaatcatgctgactgcttagattcagctgggccacggttaaatgtttgtgataaatccagtgccagcattggtgacatggaaaaggagccaggaattcccagtttgacaccacaggctgagctccctgaaccaggtaaggacatctaaatgtgataaaaaaaaaaaaattggagaaagtgctgataaacattgtccttctgaaattggtctgttgtaatggtaaagtgaagtataaactagcggggaagaatcatcacttcaatgaagaaggagttttatgtagaaaggtctgaattttgaagatgagatttccatatatattcaaaagttaaactttaccagaagcccttttccccaaccttttcaagtaaatctctataacatctttctttctcactttctctctctctctttctctctctctcttttttttttttttctaattttttttttcttttgagacagggtctcactgtgttgcccaggctggtctcaaactcctgagttcacgccatctgccagcctttgcctcctaaagtgctgggattactcttgcctgacctgttccccgtttcttaccttttaaaatccccaagctttttgggactcaatatgtaactgcaagtaattgagaggctccgatcctaggatttaaatccagttgttaggttatagaaagcaaatagattctattggatggtagtttcttttttttttcttaaggcacccgccaccatacctggtaatttttgtatttttagtagagatgagggttcaccacgttggccaggctggtcttgaactgaactcaagtgatccgcccaccaaaagtgctgggatacaggcgtgagccactgcatctggctggatgttaggttttctttgaccattacttaagataggtccttctgttttgtggacaatttgatgaaccacatgcgcttttgaaaaaactgcaagtattctgtagtacttatttgaaggtcttaggtgtcttaaattcctactggaatgaggattatgaacaaataaaaataccagaagtacccaagtgttgtacctagcagcagatggaaaacagaaatctttcaagatactaacattacacagtatacagttgaggataaagcagtgtgtgtatacatgtatatacatatttttttcttttttacagcaatatccattaacataagattctcaaaactgtgtatcatagtagatttttctctaacagctttattgaaaatgcagttatcatatcataaaattcagcttttaacgtttttaattgagtggtttgtagtatagtcacagagttgtgcaacaatcagtgcgatcaattgtggaatatttgcatcatcccagacagaaacacagaactcttgtcaatctgccttcaggtttttttttctttttttttcttgagacggagtctcgctctgttacccaggctggagtgccgtggcgtgatctcggctcactgcaggctccgcctcccgggttcacgccattctcctgcctcagcctcctgagtagctgggactacaggcgcccgccaccacacccagctaatttttttttgtatttttagtagagacggggtttcactgtgttagccaggatggtctctgatctcctgaccttgtgatccgcccgcctccacctcccaaagtgctgggattacaggcgtgagccactgtgcccagccctgccttcagtttttaccaatctgtagatttgtctattgtgtacatttcatagaaatggaatcatacaatatatggtccttttgggtctggtttcccttacttagtttaatgttttctggttcatgcctcttgtagtatgtatcagttcttctgtcttcttctaaaattatggttaaaaagcatgtaacctaaatgtaccttttttggttttttttttgagatagggtctggctctgttgcccaggctagagtgagatttactctttaacggtatttacggccaggtgcggtggctcacgcctgtaattccagcactctgggaggccaaggctgatggatcacctgaggtcaggagttcaagaccagcctggccaacatggcaaaaccccatctctactaaaaatacaaaaattagctgggcatggtggcgcgctcctgtaataccagccactcgggaggctgaggtaggagaatcacttgaacccgggaggtggaggttgcagtgagtggaggttgcagtgagctgagattgcgccactgcactccagcctgggagacagagcgaaaccccatttcaaaataaacaaacaaaaaaacagtatttaagtgtgtattatagtgtcatgaatcatgtacatgtacaacagcagatctccaggacattttcgttttgcttgactgagactctatacccattgaacaacaactcctgattttctcctttgttcaatccatgacaactaacattctttctgcttctgtgaatttgattactttagacatctcatgtaagtggaatcatgcagtatttgttgttttgtgattgggttatttcacatttcacttagcataatgttttcaaggttcatccatgttgtagcatatgacaggatcacctttttttttttttttttgagacagagtcttactgtgtcacccaggctggagtgcagtggcgtgatctcagctcactgcatcctctgcctcgtgggttctcggctcactgcagcctctgcctcgtgggttcaagcaattctcctgcctcagcctcctaagtagcttggactacaggcacatgccaccatgcctggctaatttgttttgtatttttagtagagacagggtgtcaccatgttccccagaatggtctcgatctcctgacctcgtgatccacccgccttggcctcccaaagtgctgggattaaaagcatgagccaccacgccctgccgataacctttttttatggctgaataatattccaacatactttttcttttccatactaaagcatcttttctttatcagttcattggttgatggacatttagattgcttccacatcttgactattgtgagtaatgctacagtgaacatggatatgcagatatctctgagatctggttttcaattttttttttttttttgagatggagtttcgctcttgttgcccaggccggagtgcaatggcacaatctcagttcactgtaacctctgcctcctgggctcaagcaattctgcctcagcctttcaagtagctgggattacaggcatataccaccacgcctagctaactttgtatttttagtagagatggggtttcaccatgttggccaggctggtgtcgaactcctgacctcaggtggtctgcctgcttcggcctcccaaagtgctgggattacaggcatgagcaactgcacccagtgatgttcatttcttttggataaatacctagaatggcattggtggaacatagggtaattctacttttatttttatttttttttgagacaagggtctccctctgtcacccaggctggagtataatgatgcgatctcaagtcactgcaacctctgcctcctgggctcaagcaattcttgtgccccagcctcccaagtagctgggattacagtggttttgccatgttagccaggctggtctcaaattcctgaccttaagtgatcctcctgcttcggcctcccaaagtgttgggattataggtgtgagccaccgcacccggcctacttttaatttgatgaacctctatagtgttttgcataattgctgcatcattttataagtcctttgtccatatacatatgtttttaatgatactgggcctctttgtcacctagggtggaatacagtggtgcagttatagctcactgcagcctcaaactcctgggctcaagtgatcctcctatctcagcatcctgagtagctgggagtacaggtgcatgccaccacacttggctaatttttgtgtttttttgtagagacaggtttctggctatgctgcccaggctggtcttcaactactgggctcaaatgatgttcccactttggcctcccaaaatgctgggattccagacatgagctactgtgcatatccctttgcatatttttaaatcttgttatttttaaaaaatgaggtataagagttattcatatatcctggatattaaccaattatctgatgtatgatttgcaagtattttctcccattttgtacctgccttttcactctgttgactgttttctttgctgtgtagaagttaatgtgattttttttttccatttttgctttttaaaaaatttttacttgtgctttgggtctcatagccaggaaattcttgttccttccaatatcatgaagttttttcgtctgttttcttctaggagtttcatagttggaggtcttatgtttaggtctttgatctattttatgataatttttatgtaaggtgtaaaatgagagttcatcttcgttcttcagcatgtgcatatccagttttcacaataccatctgttaaagagactatcttttccccattgtgtagtcttggcactgttgtcgaaggtcatttgaccatgtatgtgatttatttcagggatctctgtttttttttttttttttttaatttttagtaaaattgagacggggtccaaccatgttgcccaggctgttcttgaattcctgggctcaagtgatcctcctgcctcagactcccaaaaagcggggattacaggtgtgagccaccaccctggccagggatctctgtggatctctattctgttccattgacttacatgtctatatttttatgccagtacaatattgttttgattaccatagcctcatgatatgttttgaaatcaagaaatgtaaggccttcagttttttttttttttcttctcaagattgttttgtttatttgggggttctttgaaattacacactaatttaggatagtttttttatttctgcaaaaaaaaatggcttttgagatgttgatagggatggcattgactttagtttcctttgggtagtagggatatcttaacaatattaagttttccaatccatgaaaacaggctatctttccatttatttatatcttccgtaatttcatccaacagtgttttggagtgtacaaccatttctcctccttggttaagtttattcttaagtattctattcttttttatgctattgcaaatgtgattgttttaatttccttttatattgttcattatgagtatatagaaatgttcaggtttaattttgtatcttggaactttgccgaatttgcttctttgttctaatagcgtgtggaatctttagggtttcctacataaaggttcatgtcatctgcaaagagataatttggctccttgcttccctatttattgcctaattactctgctaggacttcaaataatgtgttgaataggttgctacagtggtatatttcccttgctctttatcttagaggaaaagctttcagtgtttcactgtcaagcatattagctgtggtctttttatatatagtctttattatatttatgtaattacttttttgtttgtgtttttgtttttggacagcgtcacattcttttttttttttttttttgagacagagtttcattcttggtgtccatgatggagtgcagtggcgcgatctcggctcactgcaacctccacctccctcgttcaagccattctcctgcctcaggctcctgagtagatgggattacaggcgcctgacaccacgcccggctaatttttttgtatttttagtggagacggggtttcaccatgttggtcaggctagtctcgaactcttgaccttgtgatctgcccacctcggcctcccaaagtgtagacagggtcacattctgtcacttaggttggagtgcagtggtgatatggctcactgcagcctcaaccacccaggctcaagcaatactcccaccttgacctcccaagtagctgtgactacagccatgcaccaccatactccgctgatttttaacctttttgtacaggtcaggttttactatgttgcctaggtgggtctaaaacttctgagctcaagtgatcctcccacctcagcatcccaagtagctgggactgcaggtgtgcaccatgacacctgactaattttgtaattttttgttgaaacaagattttactatgttgcctagggtggtctcagactcctgggctcaagcagtcttcccaccttggccccccaaaagtgctgggattacaggtgtgagccaccatacctggcatgtaatttctttttattcctagtttgttgagtgctttcttttcagtcatgaaaggtagttgaattttgtcagatgttttttctacctcaagtgtgaaggtcatgtagtttttttggggtcctttattctgttaatgtgctgtattctgttgattttttttttctatttttgaaccatcgttgcattccaagattaaattccacttggtcatgatgtatatttcttttttttttttttgagacggagtctcgctctgttgcccaggctggcgtgccgtggcgcaatctcgggtcactgcaagctccacctcccggattgacgccattctcctgcctcggcttcctgagtagctgggactacaggcgccccccaccacgcccggctaaattttttttgtattttttagtagacagggtttcaccatgttagccaggatggtctccatctcctgaccttgtgatccgccctcctcggcctctcaaagtgctgggattacatgcatgagccaccgcgcccggcccccccttttttttttctccagctggccctaacgggagccgtatgtttcttttaatgtgctatttaatttgatatactagtattttgttgaggatttttgcatcagtatttataaaagatgttgctctgtagtttatcttttcatttctatatgctctagtctttgtttctttccttctaccaactttgggcttagatttatttttctgtcttctcgaggtgtaaatttaggttgttgagttgaaaactttgtttttcaatgttggcatttactgatacagacttctctcttagtagtgtttttgctgcatcccataagttttgtgtttttttttttgagagggagtctcgctctgtcgccaggctggagtgagctggcacgatctcagctcactgcaagctccacctcccgggttcaagcgattgtcctgcctcagcctcccaagtagctgggattacaggtgcctgccaccacgcccggctaattttttgtatttttagtagagacggggtttcactgtgttagccaggatggtctcgatttcctgaccttgttatcctcctgtctccgcctcccaaagtgctgggattacaggcgtgagccaccgcgcccggccctgtcaaaagatattttcaaatttcccttgtgatttcttctttcttccattgattgttcaagagtttgttgtttaatttccacctattggtggatttttcagtttttgtactgatactgatttctagtttcacttgattgtgactggaacagatacttggtatgatttcagtcttcataaatttgttaagacttgtgtggctgggcatggcagcttacgcctgtaatctcagcactttgggaggccaaggcgagatcacctgaggtcaggagttcaagaccagcatggccaacatggcaaaaccccatctccactaaaaatacaaaaactagctgggcatggttgctcatgcctgtagtcccagctactcaggaggctgaggcacgagaactgcttgaacccaggaggtagatgttgcagcgagctgagatcacgccactgcactccagcctgggcgacagagtaagatcctgtgtcaaaaaaaaaagactctgtgtgaccatattggagaatattctatgtgcttttgacaagaatgtgtattctgctgctgtttggtattggtgttttatatatgtttgttatatgcaattgttcaagtcctctgtttctttattgatcttcattgtggttctctccattattttaacgtggagtattaaaatctccttgtgttactctatttctcctttcaattctgtcattatttgctttttatatttgggtggtctgatgttaggtgaattacgtatttgcaagtgttatagcttcctgatgaattgactgttttattatcatatcatgtgttcctttgtctcttgtgacagtgttttacctaaagtgtattttgttttatataagtatggccaaaacctctgctttcttttgtttaccactggcatagaatatctttttgcagccattcacgttcagcctctgtgaagtgagatttaaggctcacttaaatcttaggtgagccttttatagatagtacctaattgtataatggttttcattcactcaaccactctatctttagattggggagtttaatccattttttttcttatagtaattgcttttttttttttttttttttttttgaaacagaggcttgctctgtcgcctaggctggagtgcagtggcatgatcttagctcactgcaaactccgcctcccgggttcaagtaattctagtgtctcagttttcctgagtagctgggattacaagcgtgcaccaacacgcttggctaatttttgtctttttagtagagacagggttttgcagtgttggccacgccagtctcaagtgatcttcctcaagtgatccacctgccttagcttctcaaagtgctgggattatggttatgagccactgtggtcggcctctttttttatggagacaggctctccctctgtcatccaggctgtagtgcagtggggcaatctcagctcactgcaacctccacctctgggttcaagcgattcttgtgcctcagcctcctgagtagctggggctacaggtgccttccaccacccccggttaattttgtgtggtttttcatttttaatagatacggggtttcaccatgttggccaggctggtcttgaactcctagcctgaaatgatccacccactttggcctcccacagtgcagggattacaggtgtgagccactgtggcctgtatttggcctcattttttgttaaagtaattacagacaaagatttgttattaccattttgctaattgtttctcgtctggtttgtagctgttttgtcccccttttgctgtctttctgccttccttgttttttgtttttttttttaattgacatactttgttttctttatcatttcattttatgtatcttcaataggcattttccatgttgttaccatggggcttaaataaaacatcttacaggtacagtaatctattttaagctgttaacaacttaagttgaatgtatataaaactctttttttccccccaattttttttcaaggcggagtcttgctctgttgcccaggctggagtgcagtggtacaatctcagctcactgcaaactcccgggttcaagcaattctcctgcttcagcctcccaagtagctgggattagattacaggcatgcgccaccatgcctggctaatttttgcatttttagtagagatggggtttcaccttgtcggccaggctggactcgaactcctgaccttatgatccgtccatgttagcttcccaaagtgctgggattacaagcattagccactgcgcctgccctgtaaaactcatatttccccttccccactttgttgttgtttttgttttttctttttttgagacagagtttcattctcatcgcccaggctggagtgcagtggtgtgatctcagctcacagcaacctttgcctcctgggtttgagtgtttcttctgcctcagcctcctaagtagctgggactacagggttgtgccactatgccgagctgagttttttgtatttttgtggagacagggtttcaccattttggccaggctagtctcgaactcctgatctcaggtgatctgcccaccttggcctcccaaaatgctgggattacaggcgtgagccatcgcacccggcccccactttgttttattttttattattattactttttgagatgttgtctcactctgtcacccaggctggagtgcagtggcacgatcttggctcatttcaagtttcacctcccaggtacaagcgattctcatgtctcagcctcccaagtagcttggactacaggcgcgcaccaccacgcccagctaatttttgtgttcttagtagaggcagagtttcaccatgttgaccagtttttatttcttttggttatatccctaggagtagaattcctgggtcatttggttattctatattcaaccctttgagtaactgccaggatgttttgcaaggctgctttaccataatatatccctcctagcaatgtatgagggttccacttcctccatatgcttgctgacactttatttggttatagccgtccttttgggtgtggagcagtggtatctcattatgattttcatttgcattcctctgctggctaatgatgttcaatatattttcatatacttttgggtcatttatgtattttatttggacaattacatatctagagtctttgactatattttaattggggcttttttgccttttggttattaagtaataagaggtctttatatattttacatataagtccattattatatatgatgcaagtattttctcctattctttgggtttatttgatacacacatattttctcctcttatttgggttgtctttttattagtttgatcatataccttgaattacaagaatttaaatcctgatacattctgtttgtttgctattgttggtgtatgttagaaccattgtgtaattcttggttatgaggatttaccctatgttttcttctaaaacctttgatgcattttgaattattttttgtatatggtgtgagtgaggggtccaattttattttgctgcatgtgggtgtccacttgttgaaaagaatattctttttctttttcttttttttttttttcagacagagtctcgctctgtcacccaggctgcaatgcaacccagagccggatcttggctcactgcaacgtctgcctcctgggttcaaggagttctcatgtctcagcctcccaagtagctgggattacaggcatgcgccagcacgtctggctaattttaatttttttaagagagccagtctaggcacggtggctaggccgggcacggtggctcacagctttaatcccagcacttttgggaggctgatgcgggcagatcacttgaggtcagaagttcgagaccagcctggccaacgtggtgaaaccccatctctactaaaaatacaaaaattagccggatgtggtagcagatgcctgtaatcccagctacttgggaggctgaggcaggagaatcacttgaacccaggaagcggaagttgcagtgagctgatattgtgccatagcactctaccctgggcgacagagcaagattctgtctccaaaaaacaaaacaagagacagccaccacgcccagcctgaaaagaatattctttacctatttaatggtctttgcatccttattgatagtcagttggtcataactacgtaagaggttggttctgtgctctcaatgaggtggtggctcacacctgtaattccagaattttgggaggccaaggtgggtggatcacctgagatcaggagttctagaccatcgtgtccaacatgagggtcaaacctcatctctactaaaaatacaaaaagtagtcaggtgtagtgacacatgcctgtaatcccagctactcaagaggctgaggcaggagaatcgcctgaacctgggaggtggaggttacaatgagctgagatcatgccactgcactccagcctgcctgggtggcagagcaagactcttgtctcaacaaaaaataaataaaaattgtaagtgttagttacagtatttttgtagtaattaattacagtatttttgtagtaattaattttactgtgtttctgaaattggaaagtataagttttttaactttaccctttttcaagatcattttggctcttttgcatctttggtgtttcatattaatgttagaacaaggttgtaagtttctgcaaaaaagccagttatgattttgatagggattgtgctgaatctgtggggtagtttgcatagtgttgccatcttagcaatattaagtcttccaatccatgaataatagatgacttttcatccaattagattcgtctttcacttctttccatgatactttgtaattttcagtgtataaattctgcacttaaaaaaatttattcctaagtattttagtctttctttgtccttttataaatgaatttgtttttgatttcattctcaaattatctcatgtttatgaaaattttgtatattattttaatatttaatattaatacaaacattttgtatattattttatcgtgcaactttgctgaactcatctctgttaattaatagaattgattactgtttgttagtaatagtatttttttatgaattattttggattttctgtgtacatgaccatgcaatctgcatgttttctaatctagttgcccttttccccctttgcttacttaccctggctagagcctccagtgtgatgcggaatactagtggaaaaagcagacatccttgtcttgtttttgatgttaggaggaaataattgagtctttttcattaactatgatgtcagctgtggttttgttatattacctttcatatttagaatgttctcttttatacctattttgtcacatttgtaagatcttttttgtgtctattgagaagacaattttgcgtttccccctttattctatccatatgatgtattatattgattgatttttgtaatttgaaccaactttgaagtcctggggtaaatcctacttggtcatgttgtgtaatgttgttggatgtgttttgcttgtattttgctgaagatttaaaaatctatactcaaaggatattggtctacagttttcctatttgtgtgataccttttgtctagttctttttgttgttgatgttttttgtttttatatttttgagacggagtttcgccctcatcgcccaggcttcagtggtgtgatctcggctcactgcatcctctgcctcccgggttcaagtgattctcctgcctcagcctcccaagtagctggggttacaggcacgtgccaccacacccagctaatttttgtatttttagtagagacggggtttcaccatattggccaggctggtcttgaactcctgatctcaagtaatctgcctgtctgagcctcccaaagtgctgggattacaggtgtgagccgccgtgcccagccgtcttagtctagttctgctttcagagtatactggcctcatagaatgaacgtgacaggtagtttcttaagtagtgctttgttataacccaattgtggcctttcttatttattttctcccctttttcctgacatcctttactttcaccgcctttatatagatctacctttgctagtaaatagggtcatatgggtgctggaaataatccattcctgtgaattattattaatgtacatgtgaatattactgttaaagcagatgatgtcttttccttaagaatagttcacaattttcgttcattatatttcaaatattttcatataattttatttttacttcagttttgaattttttggttttgagtatgtattgaaaagatgagagaagctattcagtaaaaattttcctcccaaccctgtacctcagtggcttagatctgctctccagagatactcagtgtatgaattaccaagaaaaaggtagatgtgtgtttgttacacaaattcaacagtatatatacgttgtttgtaccttgatttttttgtttcactctcatatccatgcataatgagtttctcattttttaagcagcagagtgtgccatagtttttcgtttttgtttttgagacagggtctcactttgttgcttaggctggagtgtggtggcacaatcttggctcactgcaacctttgcctccggggctcaagcaatcctcccacatcagcttcccaggtagctgggactacaggcacgtgccaccacacccggttaatttttgtatttttggtagaggtgaggtttcaggttggtcttgaactcctgagctcaagtgttccacctgctttagcctcccaaagtgctgggattacatgcgtgagccaccgggcccggccagtagtgtgccataatttgttaaacctgttctcaattaatggacatttagtttgttttccagttttaagtaatttaaaatttagcatagttaaaaatcttaagtcatttggtatgtgtgagagaacctgaaagataaattgctatcgaggtttatttatttatttttgaaatggggttcttgctgttttgcccaagcctggtctcaaactctttccttcacttgagagatcctcctgcctcagccaaatagctgggaccacagccgtgtactaccatgcccagcttaggtcatttggtttgtctttggcgatatctcatagtattccaatttgaaatttcacttcatagttgttatactgatatgttcctactaacagtacagaaaagtacagattggcattctgttaattttttttaacatccagtctaaccacccccttttccaagtctgtattcccactcacaatctagtaattaaaaaaaaattttgagtaaagtatgaaattttgttaaggggctgcatgtatagttttgatatgaatgaagctatgtttcagatggttaatttactttggttgtttggaatttccaatggttttttattttacagagtcctgccaaatttataacaactgtagggcagggtgtggatagggatatttttactgagtaaatactattacatgtactagaggtattctgttatgttaaaatatcccgttagagatacatgatgaaacacatatggatgaaatattatggagtatgagatattgcaaaataacatggaaagatggggatacagataaaaatagattggccatgaatttgtaatcagtgagtctaggtgtttactatactggttttgtagatgtttgcaattttctgtgatacatcctttttcagtaggaattcagaataaagaaagtgctaaatatttgagtaaatcagttgactatgaaaataataatgccttatggtcttaaatacatatggcattaaaatataccacaacaataaaatataagttgataaggaggcagatggaagttagtttcctttactttctggcaggatgataacaatattcattaactttggatttttatgagttaaatattattattattatttttagacagagcctagcacccaggctggagtgcagtgatgcgatcttggcttactgcaacctccgcctcccgggttcaagcaattctcctgcctcagcctccggagtagctataggtgtgcgccaccacatcgggctaatgtttgtatttttagtagggacagggtttcgcctgttggccaggctggtctcaaactcctgacctcaggtgatcccgctcgccttggcctcccaaagtgctggcattacagatgtgagccatacacccggcctaaatattcatatttaaatttttaaaataacctaaaacatggaacagaaagcagaaagtttggcctagcacagtggctcacacctgtaattccagctattcgggacagttaggcaggagaattgcttgaacccaggaggcagaggttgcagtgagccgagattgtgccattgtactctaccctggaccacaagagagaaactctctcaaaaaaaaaaaaaagcagaatttttttttgtaatttatttttttttggaagattcatcctgtagattttctcaggctgcattgcgctgtatgcagctctgttatatggttttacatatttctcttactctgtacagtagtctccctttatctagaaactcatttttcacagtgtcaattacctgtagtcaactgaggtccaaaaataggtgagtatagtgcaatgcagttattttggggcagagagggagagagagcacattcacgtaagttttattatagtatattgataacattggcctttttttctttttcttttcttttttttttttttgagttagagtcttactctgtcacccaggatggagggcagtggcatgatcttgacttatgagctattagctgcaactacagacatgcaccaccacgctaagcagatttttgtatttttagtagggacgggattttgccatgttggctaggctggtcttgaactcctgacctcaagtgatccacctgcctcgacctcccaaagtgctgggattacaggcgcgagtcaccagccccggcctaggctgaatgatctagattgccactattaggaatggttttggggtttttgcctttttttttgtttctttaaacttttttctctgaggctccagaactaggaaagtcgaggtataaatagggtctaataatctgtattggaagagtgatgttgctactagtattctagtcctttggaaaaattcaccattttaatgaaaaggagaaaactgtatgtagttcagtcttgatgaaagagattttactttttaaaattaactttatccaaggtataatttacatactgtgaaattcgtacattttatgtatacaatcgaatactatttgcaaatttaatgtgttatgcaaccatctctgtaaatccatttcggagcatttctaccatcccagtaaagatccttctaatctgtatatagttaatccctcttcctaccactagtcctagagaaccaatagttgactgtctctgtagatttgccttttccctggacatttaatattaatggaatcatgcaatatgtgatcttttgtgtcttgttcttctcatttggtatatttttctgatttaaaaaaaaaaacttaccatctgtaatttgtccccttttttgctaaatagtattccaccatagatgtatgcctaattttatttattcattcattcattgattaacatttgggctgtttcaactttttggctgttttatcattttagttggtagtgtatactctgaggtctacggctattgctatactcatccagtatttgtcatttatctctttcttcacaatacagtgacattttgtagttgtatagtaggcatgacgtactggttgtgtggtaggaattagggcatatttgctgagaaccttaggggtagtgtgatttggctcttgctttgtttgatatttgctacatatcctgtattaaggtttgcataattactcctctttccattgacttgtgcagttttatggattttgatattttcttccagtatccaaaaggtcatattcctcctttgttcctgatatattctttatcttagcttggcaaatcacttacttttttgcctcactttgctcctctgtagtaagagtaggtgaattctccatgcttttctaactgaaaagtgctgtaactgggagagaacataggtagggagttggggtagttgaggcaaggaagaaagaggggaagcctagcaacagccaggaagcatctttttatgtatttttttatttttttgaggtggagtcttgctctgtcacccaggctggagtgcagtggcacgatctaggctcactgcaacctccgcctcccaggttcaagtgattctcctgtctcaccctcctgagtagctgcaactacaggtatgcaccaccacacctggctagtttttgtatttttagtagagacggagcttcaccatgttggccaggctggtctcaaactcccgacttcaagtgatctgctggcttcagcctcccaaagtgctgagattataggcatgagccactgcatcccacccaggaaacatctttttaaaaatcattcagttgtcaccatgctgtttcacttacaatatgttactctatttgtgttttatttttattttttattttttagacgaagtctcactcggtcgccctggctggagtgcagtggtgctgtcttggctcactgcaacctctgcctcctgggttcaagtgattctcgtgcttcagcctcagtatgttactttattttttatttagggaaagagttggtagacgtttctaccaaagtagaaaagtgccagatagtaaatattttaggttttatgagccataagttctctgtcacctaatagatgtatccagtacagaatttctcactttaatttccagtcttttgtgctatctgctggtttcattgtgagctgcaaggaaatagagagctggagtattgaagcctagtctgagaagttactctatgagagaagcaaaccccaaaggtagagtggaaacagcaattataagaggaaacgtggccaggcgtggtggctcaagcctataatcccagcactttggaaggctgaggtgagcagatcacctgaggacaggagtttgagaccagctgggccaacatgatgaaacactgtctctactaaaaatccgaaaaatgagccagatgtggtggcttgtgcctgtagtcccagctactcgggagactgaggcacaagaatcacttgaacccatgaggtgaaggttgctgtgagccgagatcacaccactgcacttcagcctgggcgacaaagcgagactccgactcaaaaaaaaaaaagaggaaatgcaacaagacttagcctatggaacctgccaagaagaagacaaaggaaggagactgtctaggattgagatccaatttgtgtgagggggttagtgatggatggggataaaggggcatgatgtgatagcatagggatctgttttaatgaaaaatgttcatggggagttttgagagactttgggatggaattatgaccttgccacctcaataattaactaataagatgggtttgtgtaagtcaccaccctgcccccactttgagacagggttttgttctgttgtccaggctggagtgcagttgcacaatcctagctcattgcagcctcaaactcctgggctcaagtgatcctcccgccttagcctcccaaatagctgggactacaggcgcgtgccaccacacctggctaatttttaactttttgtagggacgaggtctcgccatgttccccaggcttgtgttgaactcctgggctcaagtaatcctcttgcttgtgcctccaaaagtacttggattacaggcgtgggccactttgcctagctgttttcaccattactttgaagaaaaatgtatactttaatattttgatcataaaacatgacaaggttattattattttttgagatggaggctaaagttcagtggcacgatctcgactcactacaacctccaccttccaggttcaagcaattttccttcctcaccctcctgagtagctgggactacaggcatacgccactacacaattttttatttttagtagagacggggtttttccatgttcacaggctagtctcgaactcctggcctcaggtgatccgcccaccttggcctcccaaagtgctgggattacaagcatgagtcactgcgcccaaaccgtgacaagatttttttaaaggacgtacccaaaattccatttttaatctttcaattttttcttttcttttgatccataaagcaattgcatatatattaaatcttattctcctgccttttgcatacatgacatacacttttatgttattgggataatgacatataatcagttatatatattattattattttatttttacagatagggttttgctgtgtcattcaggcttgagtgtggtggcactgtcttggctcactgcagcccctatctcctgggctgaagccatcctcctgcttcagtctcacatgtagctgggaccgcaggtgtgtgccaccacaggcagctatatttttatgtttagtagaggcatggtctcactttgttgcccagcctgttcttgaactcctgggctcaaaccatctgctcaccttggcctcccatgccttttatgttttttgataattctgtttagatgtatagttctctgttttttagcatgagacagtaatacaaccatatgatactaaatcgatgaagtgtttgtaaagtggttttgaaattcatgtggtagtgccgattatataatattctgttgaaatgtcattcctgatattctacaaaatccatagagatgttgtttaaaatgcaggttgagcattcctaatcagaaatccaaaatgctccaaaatcgaaatctttttgaatattgacataataccacaagtggaaaattccacagttgacatcatgcaatgtgtcagtcagaacacaggaacacagcagagtttattcaacgtcccccagggaaaaactatccttccatcacccttcagcttagatgtatcttttgcatgcacagccggattttcccatgcaattatacccataaaaggtgataaaatggcacacgtgcaggctggatgcaccaacagaaagttttccaaaataacccacatggggcaaaagcctccttgcattattcattgtgtttttaaattaaaaagaattttttcctgctttgtggtataaagattttgttgaacttctcagaaagcctgaagatatccccatagattagagtaataagaaaggaggaagaatttaggtatagtgcagaaagtaagtcaggctcttggagaaactagacagtggtgtaagtgtgaaacatctttcagaagagtatggtattagactgaccaccatgtatgatgagacaggccctacaggaattcaggatgactaggacagagtaactgtgctgggatgtgctaattaagcaggcatgtgtaagtgtaaacttgctatgataggcaaaagcttgtgttctcactgttagtgatttcaaggcatgaatttcttttcttttctttttttggagatagtctcgccctgttgtccaggcttgagtgcagtggcacaattatggctcacagtagccttgatcttccagactcaagcattcttccctggtagctgggactacagctgtgtgctactatgcttggctatttttttttatttttatttttagtagagatggggtctcactatgttaactgggctggtattgaattcctgggctcaagtgatcttcctgcattggcttccctaagtgctaggattacaggcgtgagctgctgcacccagccccaaggcataaatttttttttttaaagtttggctctgtcacccagcctggagtgcagtggctagatcttggctcactgcaacctctgcctcctgggtttaagtgattctcatgcttcggcatctggtgtagctcgcattatagacatgagccaccatgcctggctagtattttttttttttttttttttaagtagagacaggctttcaccatattggccaggctggtctcgaactcctgagccaccgcacctgccccaaaggcatgaatttcttaccagttcgttattatgctaacagaaaggcatggatatctagggacatcttttctgattggtttcacaaacattttatagcagtagttggtgcttatttcagggaagctggacaggatgatgactgttcctccttgaaaactcttcggctcatcctgcagctgcaattttatcaaaaataatgtttatgccatgtgctttccctgaagtgtgacttcactgccatatgaccagggaatccctagattgatgaagagtaaatataaaaatgctttcttgaatatgctggcagctgtgaatagatgtatgggtgtgaaagggtttcaaaaggagtgaaggatgccatatatgctgttgtcagtgtctggaacacagtgactaaaggtacagctgtgcatgcctggcaccacttgtgaccttcagctgtgttcactgatgataatgaacaaggtggtgattttgatggcttcttcagtaaagtgagaaaaatgtgtaacatccttacatatgcaaaaagtataccttccatttgtcagtaagctggaagaagtggataacaagaaagcttttaatatcgacaaagaggctcccgtttctttgttcaacatggtgatagagctgacatcgatctgaatcagagtgattgtgataatgaagatgacattaacactgcagaaaaagtacctatagatgacatggttaatgtatgtgatgggcttattgaaggaccagagcagtgttcattcataacagaaaaagaaatcatgtcagtttataaaatgagagccttgggctgggcgcagtgtctcgagagcctgtaatcccagcactttgggaggccaaggcgggcagatcacttgaggtcaggagttcgagaacagcctggccaacccggtgaaatgctgtctgtactaaaaatacaaaattagctgggtgtggtggcaggcgcctgtaatcccagctactcaggaggctgaggcagtagaatcgcttgatcctggaaggtgaaggttgcagtgagctgagatcatgctgctgcacgccagcctgggtgacagagtgagcccccgtctcaaaaaataaagaaatgaataaaatgagatccttctagacaatactcgttgttaatgagacagatgactttagaggaaacattttaaaaagctatcccacagaatgcctcttcattcctagaggacttcctggttcctaattgcttctgatgatgtttcttcttaccttataaaataaaacagtatacagtaaccttttaatcaaaacacagcatcatagatggagacacaaagcccgacattgttattactgtttttttatcagctgatacatgtattctcgtgatactactgtgctgcttagctaccctgaacacacattactttttcactgtattaatggtatgtcatatttttactgttaagtacttatgtgtgaataagtataagaaaatgtttgcctgtcagtagcacataaattcagagacaggaatgatggtaatgccaaacaaccacagatattccacatggtggctgagataatgacacttttgctttcttatggttcactgtacacaaactttgtataatgtagaaaataaatattttgtaaaattaccttcaggctatgtgtatagaagatgtgtgtaatacataaatgagtttggtatttcaatttgggtcccatccccaagataacttattatatatatatgcaaatattacaaaatatgaaaaattctaaatcacttctgatcccaagcgtttcagataaggcatacttagcctgtaactcaagatgtattttacctatttacctgatctagatgctacatttttgttaggtatatattagctttatatgtacaggtgtcagtgactataagacctggctttaaatttaaccttttccttaattttggatgggccacatatattctattatttgtgtatataaggtaacacaagtccttttgtctccccccagctccttttgcatatgagaaaacataagccattttgtgcctcttgcatcttaagccatagtctattttactatgtggtttcccatctggttacttttgggagtatcagatggtctcataaaaacagtgggttttcctgaagctttttgattaatgttgaatttgtttatcatcttttagctgtgcggtcagagaagaaacgccttaggaagccaagcaagtggcttttggaatatacagaagaatatgatcagatatttgctcctaagaaaaaacaaaagaaggtacaggagcaggtgcacaaggtatgttgcaaaatttcagcaaactttcactggtccttaggaaactgcaattttatcttcaatgtcatactttatcttcatgaaacaataatttccttaactgagatcttgttttttattctcagcttctagcacagtacttaggatttagtggttattcaggaaatatataaatgaatctacatattgtatttatttatgtatatatttttccctctttgccttcaaagagtaatgacttaggaatattgttatgatttaatcttaagtaaaaatataggctataaagtgaaatatatatagtctgaccctaatttcaaaagtaaatatatcttatttgtcttatttttcaactcagttttttaaaatgaaatagagacatcttgacattctacccctacatagtttaatatgtagttaaaaaatggaacattttcctttataatcaatttaacatatttacatcttatataagatctgtttatctgacatcaactgtctttcaaatttcatcaattatcccctaacctttacctttggattattcataccaggactcaatctaggactgctcattgtaactggttgttatggttctcaaatcactttgaattcagaacaatcccttttttcatgatcatgatcatgtctataagagagtgacatataaagtcatctactttctgtatttgtgtaattgcttcctcataggtgtcacttagattgttttctctatctcctgttctctgtcaaatggaagatagaacctatcagtttgatagattgaaagttgaacatttttagctagactatatcagagatgataatgtggaatatattgtacattagagggttaaaaaatgttttattcccatcagccattccctgacagtttgttctttcttttttaaaattgagacagtgtcttgcccaagctggagtgcagagatgcacgaacacggttcactgcagccttgacctcctgggtttaagcaatgtttccgtctcagcctcctgagtagttgggaccaaaggtgcacactaccacacctggctaatttttgacaacattttttttgtagaggcggtgtcccactatgttgccctggctggtctcgaattcctgggctccagtgatctttctgcctcagcctcccagagtgttgggattacaggtgtgggccaccatgcccagcttccctgatggttttttgaaaaccccagttgaagatctttacctatatcaataattttattagaggttacaaaatgaagactttcagattttattattttctctatttttattaactgatagtctctttcattaattggactctgttattgtcctgaaatacttgaaaggcagaataagtgcttctttctttcccattaattaccaattgtaacattaaggagttcattagtagttgttttaattggagacattagagcagtctctttcccctgcttttgaattattgttgtggacttatcaatattatagcttcagtgtatctcagtcaacttcatttaattttggttaaaaaaatatatatatataatgtaaattttattattttatctttttttttttttttttttgagatggagtctcactctgttgcccaggctggagtgcagtggtgtgatctcagctcactgcaagctctgcctctcctgttcacaccattctcctgcctcagcctcccgagtagctgggactacaggtgcccgccaccacacctggctaattttttgcatttttaggtagagacagggtttcaccatggtagccaggatggtcttgatctcctgacctcgtgatctgcctgccttggcctcccaaagttctggaattacaggcgtgagccaccacgcccagcctattttatccatttttaagtgtacagttcagtagcatgaagcacagttagattgttgtgcaaccatctccaccatccatctcgataatttttttcatctttccaaattaaaaatcaatacccattaaccaataactcccttttctgctcagcccctggcaattgccattctattttctgtctcaagaattttcttattctagatacctcatatacttgaaatcatacgatatttgttctttgtgtcttaagtaatttcccttagcatacataatgtcttcaaggttcatccactttttgtagcctttgtcagaatttcattccttttaaagtgtgttattctttttgacacttaaattacaacaattttggcctgtggactctatttttattttttgttcttaggtaagttcccgctgtgaagaggaaagccttctagcccgaggtcgatctagtgctcagaacaagcaggtggacgagaattctttgatttcaaccaaagaagagcctccagttcttgaaagggaggctccgtttttggagggccccttggctcagtcagaacttggaggtggacatgctgagttgccgcagctgaccttgtctgtgcctgtggctccggaagtctctccacggcctgcccttgagtctgaggaattgctagttaaaacgccaggtaaggtggggttggggtctcagtatttgagcagatatgattagaggaagcaggagattttagtatgttttgatgtaaagccaacattgtatctatatacaataaactacccccttttgtcctgggaaatacttaaaatgatggttaattagatatagttactaaccatgaactgtggcacactatcaagaagatgtatttttaataactatgctccttgctccagtgttgctcttcatgattgttgatcagccactgtgtaaattaacaaccaggataacagggcttcaagaggagtactgcacattagtggaataagcactatgcttcaagtgctggctccaccaatccttgtgttacttgggaagttgtttaatctctgaacttgtttcctcatctataaatggagatcataatgtattaatgtgtaatgttatatacctgacaacatagtaattaccagttcattagaagttaattaccagttacttctcacttgatcattctttatatatcacctggggagagttggatctaaacatattgtctctaattcaccttgtaactattgaatattatagtcagtcaaggaatggcaagaatcctcttttctgtacccctttaaattttggatataacttttttacattatcaacagtagcttttgatgttattccttaaagaaacgattccaattgtgcttaaactagttgggtataataaaaaagatttttgaaagaacagtaaagatagttattatttcagtacctactatgtgccaaaactctattaagtcagctcttttatattattcttgagtgatcctatgaattatcttttacctattgaattttatttacttaggggcagagcagaaactataatctttgtccatttatgaccatgatccaagttctatttcactccacttctccttattttatcctcaccaacaatcagttgttataaaggcagttccgtccttctgacttctcccttagtgattttgtgagttaaagtcaccacacacacatccctcacattagttggtgcttgcattgaaaactgtttacttgttttgtttactaatattttataataagcaaattaccatcctgcctcttcccataagatgacggggaaaacatcaaaaacattgagattcattttgtgtggtatacagattttttaaaaattaacttgtgcccagtttctaaatcatctaatgtaaagatacatgcatttcaggaaattatgaaagtaaacgtcaaagaaaaccaactaagaaacttcttgaatccaatgatttagaccctggatttatgcccaagaagggggaccttggcctttctaaaaaggtatgttatttttgtaagttctaaaagaaataaactcaggaaatgagaaattttaaaaatgacattttgagtagcagttataacattgatgtacatacatatagaaattagtgtgtgtgtcagcagtcatacatgatctgagatttcctacatgaaaggctgttttgcagttgtgtgaccatgtatgtgtataaactggtttcaggtttcctttccaagtgaaaaaaatttttaaatgctttgaagattaagtttgtgtttgttataatttcttttctgggttcaaatcctcttacctgttttctactaaactactatctcaaatatcactagtctactctcctattgccgtgtcgtcgtagcccttttgttttgtttttttgagacagggtctgattctgtcacccaggctggagtgcagtggcataattttggctcactgtaatctctgcctcccaggctcaccagttaattttttgtctttttttggtagagactgggtatcaattttttttttatgtgataaatactttttgtgttttattcaagaaatctagtgtgatggtggccgggcgcagtggctcatgcctgtaatcccagcattttgggaggctgaggcgggcggatcacaaggtcaggatatcgagaccatcctggctaacatggagaaaccccctctctactaaaaatacaaaaaattagctgggcgtggtggcaggcgcctgtagtcccagctactcgggaggctgaggcaggagaatggtgtgaacccaggaggcggagcttgcagtgagccgagatggcgccactgcactccagcctgggtgacagggcgagactccgtctcaaaaaaataaaaaatctattgtgatggctcaagcctataatcccaggacttagggaacccgaggcagtaggattgcttaagctcaggagcttgagaccagcctgggcaataaaggagaccttgtctctacaaaacaaaaaactgtcccaaaaaaaccccagaaaatggtgtggtgttgcatgtctggtcccagctactcagaaggctgaagtggtaggatgtcttgagccccagaggtcgaggctgcagtgagctatgattgcgctattgcactccaccctgggtgacagagcaagaccctgtctcagtcaatcaatcaataaatgaaatttttgtgtgccccatggacacaaagatgttctccctgtgttttaggagttttttggttctggtttcacatatagatctttgttccatcttgaatttttgagatggagttttgttctcccccatattgatgtccagttgtttcagcaccatttaccaaaaaattgctgatattggctgggtgcggtggctcacacctgtaatcccagcactttgggaggcccaggtgggcagatcacttgcggtcaggagttggagaccagcctggccaacatggtgaaaccccgtctctactaataatacaaaaaaaaaaaaaatggctgggcgtcgtggtacctgcgcataatcccagctactcaggaggctgagacaggagaattgctggaacctgggaggcagaggttgcagtgagtcgaggtcatgccattgcactccagcctaggcgacagagcgagactctctctctctcaaaaaaaaaaagaaaaaatactccctgatatttatcctcaccctctcttagattcccagtatcttttaagtattaattatacttaataactcttcgtcacggttgaatttttacttttggggagagggggttgccgttaaatttgggatcagagcaagagaaaatcagaattattggttatggctagcaccaaactctggagaaaagtgtcctcttgtctgtttgggagtctgtcctgccatctgacctggcctacttcattgttgaagtcctggttactctgaggtatattttgtcataaggctaaagccatgattcagttccattttagtttaccaggcacaccaccaccctgtctgcaggtggattaatcagtatgtcaaacagaatgagagattgatctgttctggtagtgctttaagggtactctggcttaatgtatatccacactagactatatatacaaagtaagttactggcatcttagtcacatcctctaagaagttctttggtctttttcattctaaacagaatagtttgatttttattcatatggtatgattgttgtgtgtgtgcatgtgtgtgtgtgtgtgctgttaatttttattttaagttataaaattgatcataatagaaatgagactatttcctgcattattctctgactgtagtttggggagcattgtaattattttgttccacagcttttgggtaactgttaaacaatgaactaatttgttatctaaataaaatgattgctattttaaaaaaaattacagaaatgtattttgtggatttgtctaggagtctcgttttgttgaattggatacctgacatttgcccattcattttacttgaaatagacttctgatatatagtgaacgtgaggagaattgcagtcttatgatttattaatatgataaaatgagcattcagaaattcacagctgtattttatcttgttttacttccaaacattaggaactctacaacaaaaatggcctttattatttatttatttatttatttatttatttgagacagagttttgcttttgttgtctaggctggaatgcaatggcacaatctcggctcaccacaacctccaccttccaggttcatgcgattctcctaccccagcctccgaagtagctgggattacagggatgtgccaccatgcctggctaattttttgtatttttagtagaggcagggtttctcaatggtagtcgggctggtctcgaactcccgacctcaggtgatccgcctgcctcggccccccaaaatgctgggaatacaggtgtgaaccaccgtgcccagccagaatggcctttactatgctaactttttgtgaccactaaatgttgttttacagttatgatgaagaatatcatcattcttgtaggaaaagacatttgcttggggtggaactaattcatagaagtatattagtagtgggtgaggtgaataaaatgtgtggctcttgattagactcctgatgttgagtatttgttttgagttttaatgttgctttaatttggattaatctgaagtcattttaagttggaatgtcattcagtatttcagaactgtttaatttacagttcaccaggtaaacaggtctctgtcaaatctaatagctgtgaatacaattgtaggaagatgggttatttttctttctttctttctttctttttttgagacttgctctgtctcccaggctgttgtagtgcagtggcgcgatcttggctcagtgcaacctccgcctcctgggttcaaacagttctcctgcttcagcctcccgagtagctgggattacaggcatgtgccactgcacctagctaatttttgtataatttttagtagaaacggggtttcaccatattggccatggttggccaggctggattcaaattcctgacctcaggtgatctgcccccctcggcctcccaaagtgctgagattacaggcatgggccactgcacccagccatgaagatggattttaagtacagggtggagtgcaataaaattgagcctgtggatctctgggtacataccccttctctttctccatccatttcagtcacagaaagcattgtgtatctagtctatatgttggaaatctctggcaagtctttattttttcttaaggagtaggtggtgttcacaggtctgttggagcattgtttttgttttgttttaagatggagtctcgcttttgttgcctagactggagtgcagtggtgcgatcttggctcactgcaacctctgcctctccaagttcaagcaattctcctgcctcagcctcctgagtagctgggattacaggcatgtgccaccacacctgactaattttgtatttttagtagtgatggggtttctccatgttggtcaggctggtctttaactctcaacctcaggtgatccacccgcctcagcctcctaacgtgctaggattacaggtgtgagccatcatgccctgtctgttggagcattttaaaatctgattcctttccccctgaagtttccgttcaaccctttactgtggtcaggttgatttctttaattgctaaaacaagtcaaaattcaatatccatggcagctgacaattcagactttggcatataaagtaaagggtttattttttcattcctctgtaaatggtgttgttttcacttatttatagtgctatgaagctggtcacctggagaatggcataactgaatcttgtgccacatcttattcaaaagattttggtggaggtgagtatttttgagatttaaaaaacgtaatgcagtagtaagtttgaagtgctttgtctgttaaccacaaaaattgttacatgtgtaagcccgaccagtgaggtacaagttttaaaactggtttgcccaaaatctgcttcctgaaaaagaaaaaatattgataaattgaatatctactctaccaggacttttagtaggaatgctacctgtaatctctctaaagcgttacagagagttaggttattatctatagtattcctgttttatagaagaaatgtgaagatgaacaaggtagcaaggtcagggaactaaatccacacctgaccaatttcatggtcatactcctgtcttcttatccaccccaggttttctccatgccacttctttcttccactcttcatttgtctgccaatgccatttattgattagtgtcatttttgaaatattattccagatttgagcacactgcaacagatgtggtctgctagcaaagagtatcatgggaagattatatttcatgtggcctacgattattaaattttctaacaagtaaatctagcaacatgttagcttattttagctatgtgacaattgtaatcccataggttggtcaatttgcttgtaagatttaaaaataagctgctttcaaaataatatcaggccgttcatggtggcccacaactgcaatttcagtgctttggaggccaagataagaggatgacttgaggccaggtgttccatccagaccaggctcggcacttagtgagaccctgtctctatctacagtttaaaaaaatgagctaggcatggtggtgtatttctgtagtcacagctacttgttaagctgacatgtagcttaacatgttcaaggaacgatcccttgaacccgagaggttgaggctacagagagctgttgctcacaccaggcactgtagcctgggcaacaatgcgagaccatgtctcttaaaataatagtagtaataataataacaacagctcttttcctgtatttttatatttcgtttttaaaataaaacctacaacatgaactttatccattataaattttgtgttaagtgttccagctcatgagaatttcaaatctttctattgtgctcatattaactcttcttttagtgttaggctgcgagcagttttgatggcagagcttctccaactcaatcaggcagtcaaaaaagagctcactgaggcagtcttcaaaactccagctttcatactgttaactagcacagatatcctaaatgttttatgaaatacctcttagattcctctttatgtttctataacacagttgaaatgtgtttaacagaaagtgcaggagggactagaagaatttctttcttttttttttttttttggtttgagatggagtctggctctgttgcccaggctggagtacagtggcacaatctcggttcactgcagcctccacctcccaggttcaagcgattctcctgcctcagcctcctgagtagctgggactacagatgtactccctcacgcctggctaatttgttttgtatttttagtagagatagggtttcaccatgttggccaggatggtcttgatctcctgacctcgtgatctgtccaccttggcctcccaaagtgctgggattacaggcatgagccaccctgcccagcctcaaccctccatcttaatccttttattttttttatttatttttttttttttgagatggagtttcgctcttgttacccaggctggagtgcggtggcatgatctcggctcactgcaacctctacctcctggtttcaagtgattctcctgcctcaacctcctgagtagctgggattacaggcatgcaccaccatgcctggctaattttgtatttttagtagagacaggatttcactatgttggtcaggctggtatcaaattcctgacctcatgtgatctgccggcctcagcctctcaaagtgctgggattacaggcttgagccacggtgcccagtccttaatctttaaatcatatagtgatttgtattattgtctccagtcttgaagtctagggagtggtatcttttgatgactagtaaaatgcatttccccttcatctataggatttaattcctttgaagaactacaagatttgtcatttcaatcatataaattaaaatttctgtaataacctatacacttactatttaatctatatgagggagcagttacatatatgtagccatttcccttcttgttatgtcatcatgagttagtctcaattattatttcccccgttttcctaatccacaaagctggagaattaaatgagttttaaggttggtttttattctaataataggataagagattttggacatgtgtgttagtagccagcagttaacacctattttcctgtcataggcactaccaagatatttgacaagccaaggaagcgaaaacgacagaggcatgctgcagccaagatgcagtgtaaaaaagtgaaaaatgatgactcgtcaaaagagattccaggctcagaggtattactcagttcctgatcttttcaccttctaaagagaagctacttttcacgccagaggccacatccctctttcccttgagttttcttaagaatactattctactgaaatggctgatggccataaggaatcttggaggaaaagtagagccttatcctaataataaggcaaggcatgtattgcagctgtcaatatggtctttttaaaagatcatcacatcctatgctgtaggtgtccaatcaggtatataagtgtttcatcgttaagtaaacttgtaaaaccggagagtacaatatcaagtcaacatatgatctgaaggaacatagatactgtcctataaaagttgagactggccaggtgctgtggctcacgcctgtaatcccaacactttgggaggccgaggcgggaagataacttgaggttgagagttcgagaccagcctcgccaacatggtgaaacctcatctctactaacaatacagaaattacctgagtgtggtggcatgcgcctataattccagctaatcgggcagaggcacaagaatcacttgaacccttgaggcagaggttgtagtgagccgaaatcatgccactgccctccagcctgggtgacagaatgagactctgttgcaaaagaaaaaaattgagactgctggctgggcgttgtggctcatgccactcagctctttgggaggctgaggtgggaggatcatatgagaacaggatttcgagaccaacctgtgaaatacagtgagaccttgtctctacttaaaaaaaaaaaaaaaaaaatcgagactgctgtggttagcgggaagatttacttgcttatttcttgagaccatcagctacttaatcttaggacaatttttatgaatatcggccttcaggaaacaaaagatttaaaaccatttacttgcaaagcatcagtgcaatcattgatattatcttcgggtttccaactcaggttaaaagagagaagtcaggtcagcatcacacattatgatgcagaatgtttctttccaggacaatttgaatagaatgcccaagaggggcattatttaggaaacactgatcttggaaggacaaataagtaatcaaataaacttaagaatgttttctctcccttagtgaaaccttaaaatggaacagctcagaaagttccagtggaacaaacagcctcagagcagttagtggcagggcatgaggcgcccactacccgcccaatcacagcagggttagaactaacattgcatgcagtccgcccgagtgattggctgaacatctgtaagtgcttaatggctagacaaatagcagcccagagggagggggtcaaatggaagagacatcaataatacagatgtgggacattattttttctttgcaagggagaactaatgcctcacaggacggccacaagccccaaggagactgttgaggaaggtgtagaacacgatcccgggatgcctgcctctaaaaaaatgcagggtgaacgcggtggaggagctgcactcaaggagaatgtctgtcaggtagagaaatgtttgcccacttgtgttttcattgcatgttcatctttaaagggaaacccactccatctctttatgatggtttcttggtagaataacaatgcttttggatgattccagtggagtcactttctttaaggatttgacccctttttttctccccacaaagaaagatacttggagaaatagtttagtgttggtgaaccacgtgcccttaaggcccatgaaggaatatatgccgcgaaacaagtctgagatggaatatgtgaatctctggttgcttattcaaatataattctccagtacttctcatggtgtcacaatctttgggtttgtaagaaacttttcaagggtaattttagctttgagatgtttttcctttaatgtggtgactttagaaagcctaccacctatattgttttatttatttaataaatatttgtagagtatttactatgtatgaagtattgttccaagcactttataaatattacattatttagtcatcctaataatctcataagtagagttctatgattattcccattttgcagatgaggaaactaaattacagagaggataaatagcttgtttatattcatgagagaagcctggatttaaacttcggcagtctggatttagagtctccctctccgtttttctaacctttaagctccgttggacttggttggtttagagtcttaaccattttgttggattgcctctctgtgagataggggattccactttattgttagagacttgaagtctttgtgagtagagtcaatgaccatttgaatatatatatttttaatggtcttgatttacctatgtaattcttaaaatttagtatatacaaacttgaagttaggcaatgcgcagtggctcatacctacaatcacagtgcttctggaagctgaggcagcaggattgcttgaggccaggagttctagaccagtctgggcagcacagcgagacccctgtctctatttttaaaaaatttgtcttttttttaaattagccagctgtagtggctcatacctgtagcccaacaggtcaagattacagacttgtcttttaaataaacaaaaaacttgaggatgttagtttttcttttttcttttttattaattaattatttatttatttatttatttatttttgagacgaagtctcgctctgtcggccaggctgcagtgcagtggcgcgatctctgctcactgcaagctccgcctcctgggttcacgccattctcctgcctcagcctcccattctcctgcctcagcctcctgagtaccgggactataggcacccgccaccatgtccagctaattttttgtattttttggtagagatggggtttcaccgtgttggcgaggatggtctcgatctcctgacctcgtgatctgcccgcctcggcctcccaaagtgctgggattacaggcgtgagccaccacgcccggccagttcttcttttttaaattgaaaccataggccaagcacagcactaatctcagcactttgtgaggctgaggtgggtggatcatttgagcccaggaatttgagaccagccaggcaacatggtaaaaccctgtctctgccaaaaatacaaaaattagccaggcatgacagttcgtgcctgtaattcccctgctggggaggctgaggtcattggatcacctgaagctggggaggtagaggctttagtgagccatggtcatgccactgcactcccacctgggtgactgagaccctatctcacaaataataaatagtaatagataaataagttgagatctctaaaaaagtaaactcagaccagaaaatgttattgtggccaatataatttcaatccagtttctttgcctattatcttcactattacattcttggaccagatcccaaacaacagtcttaatcctcaaaaacagttatgcccattatttacttagtgagacaagtcagagtgtaaatacattttacaaagatcatttaatgaaaaggttaaaggtaaggtgaccctgtggtcctggcttgtctggatcagtctttgtgtaggtcccttgtgctgtcacaatttattaatagcacttcttttcactctcaggtgtcccggtttgaaagataaattacgtggttatcccagttgaataattagtctataacatttagttaatgcaaaaactttatttctaattcacgttgtaattaacgttttcctatttaagtgctgaaggtcagtttttttttttttttaccatatatagaaacgttattggcactctgaatatgcaaagtacaatatatagtgctatttttcagtttttatatgtgaatagtagataatggggagtcagacatttgaggatatctcagactataggttgataaagtccctgagttcccctatcaattccaggctacctctctaacctttctccctaaagctgtcctgttttttatttaagctttgattcttaagtgatcaagacctattctgtttctatgagttcttgaagctaaaacttacttagtcacctttccccttgtttgcttttcatagtagtacaaggctttaaaaatatttgggctgggtgcggtggctcacacctgtaatcccagcactttgggaggccaaggtgggtggatcatgaggtgaggagtttgagaccagcctggccaacgtggtgaaaccccatctctactagaaatacaaaaattagctgggcatggtggcgcatgcctgtaatcccagctactcgggaggctgaggcaggagaatcacttgaacccgggtggcagaggtggcagtgagccaagattgcgccattgtactccatcctgggcgacagagcaagacttcctctcaaaaaaaaaaaaaaattgataaatcttacaatgttttatagtgacagatgcccattgttatttcctaagcgcctgtcttaagtgaggccctatcttagctgagattatttcagaaaagtgatctctctctgggatggttgtaggtatgtcccaaaagggctgtttagaccttggtgggagctcttttggaactttatgatccaactctagctagccagtgtctgttgcttgaaccattcagtagctttctggtttatctctatgctcttttctgacctttctactcttgaactcgttttccatgtagcagtcagaacagtctttttaaaaatgaatacctgattttagctttcctttgttaaagctctccaatggtacacctttgtaactagactaaaatctacaactacgggcccttgcctctttctcacctccttttctgccacttttaacctttgtttactttaacccactgacactggttttactcttgattctcaaacatggaaaaacagatagatgttttctttctcttaacagaattgtgaaaaattgggtgagctgctgttatgtgaggctcagtgctgtggggctttccacctggagtgccttggattgactgagatgccaagaggaaaatttatctgcaatgaatgtcgcacaggtaaagtagatatcgaacggtcttcctccaaagaaagtttgaattttaagtttttcaggaaagacatttattggagacactattttgtggcaacactgggctagttgttacagatatagaaatggtgctgtggggtcactgctttcagaaaagctaccaagtgaataataaatgggtagcataatacagtgcaaaaagcattgtgttggtgatacatttagaatgtaatgtaagcaaagatgagctgatgccatagaggaagatatctgtgtttagctttaagagagaaagagaaattgatgtcgggaggggaagtgcagaaggtctagtaatgaaagcgtgtaaaacatttggggaatatggaatacaggccaatgtgtttatagagtttaggatattttaggtaaaaggcataggcagtaactaagagggcttcttggttactggtaatattttatatttcttaatctgcgtagtgattacatgagcatgtttacttcatcaactatactcttaggatgcgtgtactttatggtgtgtacattatacatcgataaaaatatttaccaaaaaagtaaaaagattatttgcgggttataatgcttagattgggttagaaaataggaatagtcagctgagaccagctggtaaagcacttcataaagctgcgctaaagtaaagtgttcttttttttttttttttttttttttttttttaataagagatgaggtcttgttgtccaggtttgagtacagtggcgtgatcatagctcattgtagtcttgagctcctgggctcaagcaatcctcccaactcagcttcccaagtagctgggactgcaaccacttgccaccatgcgtgggcaattttttttattttttgttgagaaagggggtcttactatgttgcccaggctggaaagtgttctctcgctctctctctcccttttttttttttttttcttagcatgatgtgtagatgttacagcatgtaaacagtgaagaaatcagggctgaggtatagatcttatgcctgtaagtcattgaagctgcacatctggatgatacttcccaaagaaaaagtgtcattagggtaggataatggtcagtgacactacctgggcgtatatgctcttataacgagttactggaaggagaggaggagctagtcaatatctctgaagccacaggagtcaggtgttatctgtaggggcagatgcagcaaagatactaaggaggttctggagtgaagagaggcttttgtatgtggcagtgagaaaatgcttcaatttttgccagaggatgtctcattacactagattgaagggtgagtggatagccgtatacataacttcttgaagaaacttgacttcagcagaaaggaagacagtacctaaagggaggatattatagggtcaagagaaaaatcattttgagtgtgtaaaacagctctattaaggtaaaattgaagtgcaaacaattgcacatatttcaggcctatgagttgataaattttggtatgtgtatatgtatgcatctgtgaaatcatcactcagcattattattttgagattcagtcaggttgttgtgtgtattgatagttcatttctttttattgctgagtagtagtttgttgtatggatttacttggttgttgatccattcatctgttgatagacatttgggttgtttcccgttttggttattataaataaagctgctgagaacattcaagtttttggacactttgtaccctccctgccccttccctccccctcccatttttcttttttttccttgagacagggtctctctctgtcgcctagtctggagtacagtgatatgattctggctcacttcagcctcaacctcccaggctcaagctatccttctggctcagcctccttagtagctgggactacaggtgcttgccacatgcctggctaattttttaaaatatttttgtagagacaggattttattacattattaccaggctggttttgaagtcctgggatcaagcagtcctcctcgttcagcctctgaaagtgttgggattataggtgtaacacacaattcctggccacattttcttttttcggtttttgtttttgtttttgtttttcagagtcttgcactgtcacccgggctcgagtgcaatggcgcagtctcggcaacctccgcctcctgggttcaagcaagtctcctgcctcagcctcccaagtagctgggattacaggcatgtgccaccactcctggctaatttttggatttttagtggagacggggtttctcctgttggtcaggctggtctcggactcctgacctcaggtggtccactctccttggcctcccaaagtgctgggattacaggcatgagccactgcacctggccaactttttcatattcttagtgatgtatttgtaagactaatagttcttaattttttgaaatccagtttatcaatttgttctttttatggactgtgatttgctgtcatagctaagaagttttgcttaacccagtgtcacaaagtttcgttgttgttttttttctttttaatctgcgacagagtctcactctgtcacccaggccggagtgcagtggcgtgatctcagctaactgcaacctccacctcctgggttcaagcgattcttgtgcctcagtctcccgagtagcaaggataccaggcgtgcaccaccatgcccagctaatttttgcatttttagtagagacgaggtttcaccatgttggccaggctgttctcaaactcctggcctcagatgatccacctgctttggcctcccaaactcccaaagggctgggattacaggtgtgagtcaccacgtccaaccagtgtcacaaagatttttagttctgtgttttcttcatagaattttttagtttcacatttcactattaggtctgtgatgtgttttgtattaaagttttgcatatgacatgaggtatagagaagatagaatttttttatttttggttttttaaatttgtgggtttttttctctttttcctaggaaagctattatctttgagagtaggacattttaccagttttggtacagtgtaagaaatgggagtcacttattagtgctcttggctcaccctattttcctgcaatagggtggtcacatcattgtttagattgcttaggtttaataatagctaccacgcctgtaatcccagcactttgggaggctaaggtgggcggattttttaaggtcagaagtttgagaccagcctggccaatgtggtgaaaccttgtctctactgaaaatataaaaattagccaggcatggcggtgggtgcctgtaatcccacatacttgggaggctaagtcacgagaattgcttgatcccaggaggtggaggttgcagtgagctgacaacatgccactgcactccatcctgggcgagagagggagattgagtctcaaaaaaaaaaaaaagttaccagttattcagcatcaggtagtgttttccctgtttacaaatacatattcaaatattgttcttaaaatatttatttgctggatgttctcagtgtttatagataaaatggatgatttgaatgagccgtttccagcaattacctgtaggaggattcatgttgaggtctgtttacctgtcaagcttaggctctttttcttatgttgtactgcatctcacagagagatagaggtctgtggtttttgttttgttttgtttttttgtttttttgttttgtttttctgagacagtctccttctgtggcccaggctggagttcggtggtgtgatctcagctcactgcaacctccacctcccaggttcaagagattctcgtgcctcagcctctgtattagttgggattataggcgcctgccaccacacccagctaattgttttgtatttctagtagagacggtgtctcactatgttccccaggctaggcttaaattcctggcctccagtgatccaattgccttagcctcccaagtgctgagtacattgcttctgggtggtttttgactttttattacaaaaatcttaagacatacaccagggtagaacaatgtaaagaatctccatgtattcagttaatttcagtagttatcaacttctctctcattttctccctatatttcaaaaggtttctaacacaacatctaatgtatagcgagaatatgtaataacttctttgtgtcatctaccagccagttcattttcaaattttctcatttgtctcagggatgtctttttattatgttttgaatcaagatctagatccagagagaggccaaaaacgtctctgtaggttttgttagggagattaccagcattgtatgtcgggtgatttcctgtagtgtaaacttttttatacatctcttaagtttctacttatctttaacaatactgcccccacactttttttttttttttttttttttttgaggcagggtctcactcttatcacccaggctggagtgcactggtgtgatctcagctcagtaaacctccaccttccaggctcaagcaatcctcctgcctcagcctcttgagtagctgggaccacaggcatgcatcaccacgcccagctaatttttgtatgtttagtagagatggagttttgccacgttgcctgggctggcctcgacttcctggactcaagccagccactcacctcagcctcctgaagtgctgggattgtaggcgtgagcctcctctcccagcccaacttaaatttcgttggttgcctcctggaggtatccccttaacttgttcctctgtcatccatatttcctgtaaacttgtagttagtccaggggcttgattaggtttaatttcagttttttctttttttggcgggggtgccagcggcaagcattttctgtagacaatatgtactttctgttgtatcacgtcagggagtatctattaccagattgttcatttataataatactaagattgttacagtgggttcagacgatgtcaaaccgatcagtccattataaaatttcttatgaacttttcacctaatggtttagcatttggtagattcttgaattcttactaatttatcttcttttggcttctcaggaatccatacctgttttgtatgtaagcagagtggggaagatgttaaaaggtgccttctacccttgtgtggaaagttttaccatgaagagtgtgtccagaagtacccacccactgttatgcagaacaagggcttccggtgctccctccacatctgtataacctgtcatgctgctaatccagccaatgtttctgcatctaaaggtatggatttcttatgtggaccagtctaattgtaaaacctcagtttaattggcaacagatattttcttttttctttctttttttttttttttttttggagacagagtctcgctgtgttgccgaggctggagtgcagtggcgtgatcttggcccactgcaagctccgcctcctgggttcacgccattctcctgcttcagcctcctgagtagctgggactacaggcgcctgccaccatgcctggctaatttttttgtatttttagtagagacggggtttcaccgtgttagccaggatggtctcgatctcctgacctcgtgatccacctgcctcggcctcccaaagtgctgggattacaggcgtgagccgctgcgcccggccggcaacagatattttcaaatgcaatcaatccaccatgtcactttatggcctctctctagcttttatcagagagattaccaacattgtatttgggagagaagaggggcataacgaactagttcagcagccaggcaatgccagggctccatagaacacaatgtggtcgtgtggtagggtattaaatatttggatttcatgtgagatgtagtttgagaaagtgttctgctgcatgtcctcttccccctattgattagaaaaccagagtgtagtcttcccctgggctttttttttattttattttattttattttatttttttttgagacggagtcttgctctgtcacccagtctcctcgatctcctgacctcgtgagccactcacctcagcctcccaaagtgctggcattacaggcgtgagccaccacgcgtggcccccctgggccttttttttttttttttttttttttgagatggagtttcgcttttgttgcctgggctagagtgcaatggtgcaatctcagctcaccgcaacctctgcctcccgggttcaagcgattctcctgtctcagcctcccgagtagctgggattacaggcatgagccaccatgcctcgctaattttgtatttttagtagagacagagtttctccatgttggtcaggctggtcttgaactcccgacctcaggtgatctgcctgcctcggcctcccaaagtgctgggattacaggtgtgagccactgcgcccggccggccatttttatatctctggtttcagtgtgatatcattcagaaatgcatgccaaggcaggattgggggtttcgtgttgatttgttttttgtttgtttgtttttttaatgaaaactcttgtcctagaaattttcttctgcttcatagttaagctgagacctgagttttccaaaactgtctgtgcatataggtaaacttaagttttgaaatgtgttctctttggtaaaacaagttgtttttgttgttgttgttgtttgttgttgtttttttttttgagatggagtttcacttttgttgcccaggctggagtgcaatggctcgatcttggctcactgcaacctccaccacctgggttcaaatgattctactgtctcagcctcctgactagctgggattacaggcacatgccaccatgcccagctaatttttgtatttttagtagagacagggtttcatcatatcggtcaggctggtctcgaactcctgacgtcaggtgatctgcctgcctcagcctcccaaagtgctgggattataggcatgagccactgcacccagcatgtgtttttttgtttgttttgttttgttttaaaacaggaggtctcgctctgttgcccagtgtgatctcaactcactgcaatgtccacctcccaggttcaagagattctcttgcctcagcccctggagtagcttggattacaggtgcttgccaccactcccgactactttttatatttttagtatagacggggtttcgccatgttggccagactgttctggaacccctgacctcaggtgatctgcctgccttggcctcccaaagtcctgggattacaggcttgagccaccgcgcctggaaaaacccaatactgtatctctgctggtgaattcatgtgtgccaaaagaaccttgactttttccatagaggattgaggaggtaaaatttagcagtgttgatgtttgttttaatcagactgtcagtaccttttttaggattatttcctggcctcatgggtctcataagtaatttcacttgttggatcaaaattgcagtttcgatgagtgtgatggtgtacacctgtatttccagcttcttgggaaggtaaagcaggaagtgggaagactgtttgagcacacagactttgaggtcacgtccagccttggcaacacagggaaaccccatgtctttattaatacaaagaaaaatgaaaagagttgcagttggctaccttctcgtttttaattgttattacagattgcattagagggtttggtggtggtttcgtgatggtttataatagatgaagtatttgaggggatgtgtttcctctggagagggtagagaggttcgttcacttgaaaggctttaaaagaatcacagagttccaggcaagcattattgttgtctcccctctccctatttattctggggctgatttcctagttgtcaggacagtggtttgagttgggctttcccttgttgaagcaggctcactgacagttacgggatttgattccttttggagacttatcacatagctcccatctgagttttcttgatggatcgagtgtttaagatccatcatcttagtggtcattccttctatttgtgacattttttcagtgctaacaaatagacttgaataactcacattctttttatatttaatatttttgtttttcttttgcttgtccctgattttcctgctttaggtcggttgatgcgctgtgtccgctgtcctgtggcataccacgccaatgacttttgcctggctgctgggtcaaagatccttgcatctaatagtatcatctgccctaatcactttacccctaggcggggctgccgaaatcatgagcatgttaatgttagctggtgctttgtgtgctcagaaggtaagaaatcatttcttcctctatttgtagtctaaaaagggattaaatcaatgttttaattggaacaaaaatacttttcatcatattgccactggaaaaaatattagaaatgatactattcatctgccattcaggaaatgatgtcccgaattaatgattacatagcagaactttttttttttttttttttttttttgagacaacgtttcactctgttgcccaggctggagtgctatggcacaatctcagctaactgcagcctccacctcccaggttcaagcagttctcctgcctcagcctcccaagtagctgggattacaggtgcccgccaccatgcccgactaattgtttgtatttttagtagagacagggttttaccatgttggccaggctggtctcaaactcctgccctctagtgatttgcccgcctcggcctcccaaagtgctgggattacaggggtgagccactgtgcctgtccagcagaactttttaaaacttggctttgttgcccaatagggagaggttttatttttcttattttgaataatgacttgaattttgttaaaatgataaacaattgaagcagtaaagacaaaaattcacttaatctcaccatcagaaaaaaaaaatcattgcttaatattaagtggcattattccagacattcatgcatgtcagcagatagaaagtctgatacctagatagaaacaattcttgaaaatagcattaccatgtaattgtgttttgttaacaagcaattttatacaaattaatagaaaaagagtgaacgtgatggaaaaagcgaagggatttgtgaactttagttatatattttctcattgtaagaatattagttcttaagagatcacgtagaggaaagataaattttctatatattttattcttagcactttcacccaggctggagtgaagtggtacaatctcggctcactgcaacctctgctgccacgccactccccatccctcccccaccggttcaagcgattctactgcctcagcctcctgagtagctgggattacaggcgttcaacatcatgccccactaattttttttttttttttttttttttgtagagatggggtttcaccatgttggccaggctggtctcttaacttctgacctcagttgatctactctcctcagcttcccaaagtgctaggattacagacgtgagccagtgtgcccggccattttattcatttttaaaatacttgttttttagagcagagttagtataaccttttacgtattttcttttctatccttatcatccctgacaacttgatttttgctagttaaatggaagattttagcactcatcaccagtatgttaattgtagtacctaaagttctgaattcgttatttcagtttttctcttggttgtctgaacttttgtgatcccacaggtgctcatttctctgctttgaggcatcatttgcctttgtactagaaggatatctagtacaaaggtaaatgatacttttctaagttcatggtaatggtattggtattttgtaatggtatttttctaagttcattgtggactttgctccactattttctagtgatgagagtggcaccagttcttcagttttctcatttattttcagattttattttgttgatttagtagttacttggcaataatttttttattatctacttattgattatgcagtttcctgaaaacctggctggctctgaacattctgagggactaattttaaaaagagtcaatatatgtaatagaatgagcattgtactttgaatctcaaagtccaagtttgaattctggcttgtctcttcaggcaaattgctttaccaaggcttggtttgcttgtttataaaatataggctctattccctatcacacagtcatattataatagcatcaattaaatgaaaagatatgattaaagcccttgcacagtgagaaaataagtttaaatggtctctggtctcatttttaatcctctgtagggctgactttttctgcagcctgcctcattttgtttgattttcttctaaaaattatctttgttattacccactttccctgcaagatgacttccttcaagaaaacaataccttctttttctttcctctttcttaagatatcactaaagaagccgaacacggtggtgcatgcctgtagtcccagctattcaggtggccaaggtggggaggattgcttgagcccaggaattcaagaccagcctgggcaatatagcgagactgacctcataaacaaaacaaaacaaaaaacaaccaaaaaaatagataccactgtgaaaggaaaataaatcccaggaggcccaaatcactaagccaagggaaaagtcaagcttggaactacatcaggcaaacctgcctcccattttattcctcaataatacagctacaaggctgggcgccatggctcatgcctctaatcccagcactttgggaggctgaggcaggcggatcacctgaggtcaggagttcgagaccagcctggccaacatggcgaaaccccatctctgctaaaaatacaaaacttagccaggcgtgatggcagacacctgtaatcccagctacttgggaagctgaggcaggagaattgctctgttctgttgaatttcaccctggcaatggaaaccgatagcttatcttcacaggtgtgggacagaaagtcatccctatgctcatctgagacaaatgcgtacctcattgcttcctctgccctatttatgtaaaaatgcagtttcactgagccagattaaattgtgtattcagtgaaaggctgatgaaggattcaaaagaatgcaaccttttgtcttttacctacttatgacctggaaccccaaccccctatcagaaccaatgacaatgttacacatactgatgtctcttatctccctaaaatatataaaagcaagctgtacccccaccaccttaggcacatgttgccaggatctcctgaggttgtgtcatggacgtgatcgtcaccttggcaaaataaactttctaaattggttgagacttgtctgacatattttgaattcacatcactaaggagatttgtattatcaggtgtatgtatatgccaataattctgtaaaagaagaattttccttacttgagatatattgtttctgtagccaaagactggagtttagttaattctggaagctttttttacttagttgaaatctgacagctagtacacagtcaatggattggtaaaactgctgccaccttagtataaaccaaggcactacctccaaaccaatacaagtaagcagtcatcgtgttctgtatcatcacctactcgcagtaaaagcatggcagtttcaccttagaagtttcttgaagtaaaacaccttagttttattatatcttgtccatgaagtcaacattgtttttctattctctgtgatgaagtgggaagtacacgtaaagcagtttctttgcatactgatggttatcttgagttaaagcactcatgcaactgagtttcaagctgaactatccacattgttcatggaacaccgtttttaattgtaagagttactgataaactatggttattcatgcttggatatttggcagacatttacttgaaaatgaacaactgtgagcctatcaattcaagaaaaagaactgcaaaataatggcgaatgataaaatttgagcttttaagtgaaaattaaaattttcgtaaactattgtctgctaccttcagtttgacaatttcttagtacttactgattggatcatggtagtattaataaatgtgattttaaaagtataatgaaataggccatttagaagatgcatatgactcaatgaaccaattttttttttttttttttttttttttgagatggagtctggctgtgtcgtcaggctggagtgcagtggcgctatcttggctcactgcaacccccacctcccgggttcaagcgatcctcctgccttagcctcctgagtagctgggactacaggcatgtgccactatgcccagctaattttttgtatttttagtagagatgaggcaatatttttaatatagctaatgcatgatgttaaaaactttgcatatgtaaaagatgcattcaaaatagaagacagatcaatgaattttagtgtagtcattttaagtttagtgacatagtttcagtttccacattgcaactatacactgtggagttttagcatagtatctaagaatgaatatccacagttctgaacaggttattttagcactcttttccagcaatatatctctgagaggccatactttcttcacgtatgtcaaacaaataacatattgcaacataattgttcttcagacttgttttttagcagcagacacatttccaaatgtaatcttactctgaatctgagcttcactatacaatacagacaaaagtgagcttttccagttgaagtaggagtctgatctgaaacacacccctggccccaacaaaaacaaataaaactcccactcttattttaagagcttgttgaagagaattattaagtaaaggcccttttggccgaaactgccatcttcctgtaattcgccaaaatgacaaacacaaagggaaagaggagaggcacccagtacatgttctgtaggccttttagaaaacatggagttgttcctttggccgcatatatgcgaatctataagaaaggtgatattgtagacatcaaaggaatgggtactcttcaaaaaggaatgccccacaagtgttatcatggcaaaactggaagagtctacagtgttacccagcatgctgttggcattgttgtaaacaaacaagggcaagattcttgccaagagatttcatgtgcatattgagcacattaagcactcctaagagccaagatagcttcctgaaacatgtgaaggaaaatgatcagaaaaagaagccaaagagaaagttaacctgggttcaactgaagcactagcttgctccactcagagaagcatactttgtgagaaccaatgggaaggagtctgagctgctggaacctattccctatgaattcatggcatcataggtgttaaaaaaaataaaagacctctggactgttaaaaaaaaaaagcaaaagtcagcatgggaataaattatatataaagtgccaacagaagtatgtttatagtaagaattttttttgtttcccagctgaagatttattggcataaatgcagccatctaaaaacataagttatgaaaaacagtcatgatgtgccctccccatccccccagcccaggcccctaaaacctcctctgggggagggagggagagagagaggaagggggagccccacaaccgtctaggaatgctcagcccctgggcccgtgcagggcgggagagccgggcctcagcacatcctgtagtctgtggagcaggacaggtcgcacagatggcccctgaaatctaggttgatggtgaagtcccggtcccagttcttggcgttgggccgcatgccgatggtgccgaagatctcctcgcccgtcttcaaggtcaggtagtcctccatgtagaacaccgtctgcttccagtgcgtgtacagggactcgggtatggtggagaagccggtccctccggtcctcttgtggcagtgcgtaaactcgatgttgaagtaggccacctgggtgtgcacgtagtcattctgcttcacttgcaggcagaacggggaggtgaaggtcaggtcttccaccttgacggtgtagatgtctacctcctttatgaggcaggcgttggtaaccagctgtttgaggtccaccacatccactagggtttccttgatggccacatctttgatgcaagatatatcgaagccataaacgttctcccaccagtggatcttgtagtctttgtactgccggtcctcggtggccgtcacatacagtgtggcccgttctgggaagatgaggctattgggcgccagccacttgtccgggcatagagcacagtgttgagcatggactcgtagaagaggcagttagcccatccacttgctgatgatgatgttcaccttttccaccgggagctctatctcctccaccttccccttggtgatggtcaccaagtggtctaacttgttggctttgacaatcttcaccgcataatcagagctactggaacactcgatgccgatgaccttgcgggcccggccttggcggcgaacatgcagaggatgcttgtgtccgagcccacatccagcaccaccttgtctttaaagaggtggcggttgtgaaacatggagttgccgaagtgggcgtaggagtcaaagtagtaatctttggacgtcatgccctcgacgttcggcttctcgctgctttccgcctggccacaggacacctccatgatgcagttcacgacctcggcggccgccatcttcacccgcacctactcctcttccggccgccaagacccccgcctttttctatagtaggattttaagaggtgaaagaagcacagtgagaacaagattaactcggatatattctttgctaaggctttactccccacttcagggtaaaacttggaattacatgtttgagtctagcatgtttgaatcatgctcatttctggcaagagcgtggctcatttctttttggcaacaaaataaaatgcctgcccgtctgctgaaactactgtgttttgaaagcatttatatatttatttatttgaggcaagagccttgctgtcaccctggctggagtgcagtggtgctgtcttggctcactgcaacttccgcctcccaggttcaagcaattctcctgtcttagcctcccgagtagctgggaatacaggcatgtgccaccacgcgtggctaattttttagtagatagggggtttcgccctgttggccgggctgttctctaactcctgacctcaggtgatccacctgctgcagccttccaaagtgctgggattacaggcctgaggcactgtgcccagccgaaaagttagtagttctaaaaggagggaaggaactaaccatatggagatactacttatgtgtcagacgctactaggtaatttattagctaggtgaatcttcaaacagatgtggttattgtttattagagaaaactccttaccgctgaggaaattatagctcagcaaggaaagtgaatttcccaagggcctgtggtcctagagctagaattccaacctgaacctgacgagagttaaataaagcttatgctgtttatactctggtcattatgtgtcactgataatgtttttatttagtatatcttttagtgaagagaaagaaaatatatatatatatgtgtatggatgtacacatacatgacttgcagtcttgtgatctgaatgccacatttttttattcccacaggaggcagccttctgtgctgtgattcttgccctgctgcttttcatcgtgaatgcctgaacattgatatccctgaaggaaactggtattgcaatgactgtaaagcaggcaaaaagccacactacagggagattgtctgggtaaaagttggacgatacaggtaagcctgaagaatagcactcatctcttttaccatcctctgtttcttgagacctctcagatacaatgcttaacgtatttctaatgatctacttaattactcatggtactcctcccctcttcttcttgatttttttccttataggaagagaaacctaactttatgatttacaattataggaataatacatgttctctgtcgaaatttttttttcttttgtgtattttgtgaaaagtttttttttttttttttaaatgaaaagacagtaataatctcacaaggcaggcgcattgttaacatttcggcatatgtactcccagacgtaccaatacgcagttatgccccccaccatccaaaataactgtttttacagattatactctgttatgtgtcttgggttgtttgttttgagacagggtatcctctgtcacccagtctggagtgcagtggtgtgatcattgctcactgcaacttcaaactcctgggcttaagggatcctgccgcctcagcctcctgagtagctgagactacaggtacatgccactgcacccggccactttttcttttttaaaatattttgattgaacatcacacaccgggaactgttgtggggtggggggtggggggagggatagcattaggagatatacctaatgctaaatgacgagttaatgggtgcagcacaccaacatggcacatgtatacatatgtaacaaaccacgttgtgcacatgtaccctaaaacttaaagtataataataataaaattaaaaaatatattttgattgaatatggaaagcacaaaggatgtaacatgcatgactttaaagaatgacaaaagtggcacctgtgtatgtacctcccacttaaagaaatagaacactgttggtacttttgaggtttattccatgccctgattccattctctcctacccccagaggtaaccactgtactcaattctaggtttttcattccttcgcccttctgtgagagtttgttttctttgctgtgttttagacctttatgtaaaggaattattgttgatacattttcctgcaacttttttcattcacttttatgcccctgagattcatcatagtattgtatagtggttcattcatagttcactgttcctttatgtagtcacataatgtctagttcacttatccattttcctgtttggactgtgaacatttggtcagtttttcttggtttatatacttgggaccttgaatataagtatatacttatatacaagtatatatttggtttatatacttagggccttctctagggcattctctggagtaaagtaggtagatagaggtttccagctttaataggtagtgccaaattgtctccctaaagtggctgtatagtaatttacattctttgattttgtttgtatgtgtttgtgttttgatttcttggtgctgttctcccatattcctactaattattgaaggtttcctttttaaagaccaaattgtattttattttgtatagtgtaccatggataatactattattttcttgatgttgagcatttatactttttccagtttttccttcttataatgcttcagtgaatgttattgtcataactctctgttcctatatcattatttcctttaagtagaatccttgaagtagaataattgagtctaagggagtgcgcgcctgtgtgggaatgtgggcagatgttttccagcttctagcacatacgacttgtttgtgttctagttaggttgtaagaatgccgtaagatggactttaatgtggacagacagacattgctaatccttacttttatatgagtaggttattttcctaatgccttgcagccttctagaggttttccttctccttttcacctttcccaggtggtggccagctgagatctgccatcctcgagctgttccttccaacattgataagatgagacatgatgtgggagagttcccagtcctcttttttggatctaatgactatttgtggactcaccaggcccgagtcttcccttacatggagggtgacgtgagcagcaaggataagatgggcaaaggagtggatgggacatataaaaaaggtaactttatcctttttgtttctcaggcaaacacagacctctgttacctgagtgtctgatctgttttagaattcacatatgctccattttgaaactgcctttgtcctctcagggcattatctggctgcaaatacagtattttgcaaggaagttgacccatgtaactcattatttttgagccttaacctttacttaatttgaatttccttgagcttttttttgacttatcagttgttttgtcagcattccatcaaataatggagttctgaaactatttcatagaagaaacacttcagtttgctagacagaggctcagatctctagcagagctacatttgctccaaggagtcttgtcttgtcttgtcttgtcttgtcttgtcttgagctcgttgggaagaagtaaaattcaccagatattgtagaacaaactagtaaaggtcaaagcataaatgctctgaatcaaaataaagttttgtaaactggcctagcaatgaaggcagggtgccctgttataagcagaactagttttactgcttaccaggtggtccaatcaacttcgaacccggttttctcttaccatgtaatggagaaagtttgctcttagaatacagtgggattataaaaagtgtccctgcagagtacataattggtatccccttagtggtaattaccttcttcctctagctgtcctttgaaagataatatatcccttgctatttaatttatttggtacttaaagtacaaatggttcccaactcagaatggtccaacttacagctttatgatgatgcacttccattatgttcctcagcttatgatgggattacatccaggtaaaccaattgttaacatgaggagcatctgtgtaagactttgtctatagggtgagatgaaaagggattctaagcaagtgacatggaagaagattctaagcaggtaaaacttcctggttagggaatgggagtaatgtcgatagggaacaagtttaacaaaggttctgtttgccacatgttattttagtagctcctcacttaccctgtttgtcttgtggtttctgtacatagatatgggctgtctatcagttctactgctaatacaaaaatacatagtactgtgctgttagtactaatacttcaggagctggggtcttgagtcttgtaatctcaggtggtcagggataaagtcgccagtattttggcctgcacagagctggccaccactgagactgggggagaaggcggagtataaggaataccgcaggtctgagcctgcctaagctctgagattctgccttaatcagggggtttctaggtgcctctgacttcttcgagcttgtatttttgcaggagaatctgaaatagataccagcagtcgaaatacctgccgggattttggtattattaatattgtggcagaagtgtgtattgtatatgctgtgggaacagagcaagaagaagctggggagcaatgtttggaagtcatgaatgattactaagtgactttgaggaatgaatcataataataatagttagcatttttgtttgccagaccctgttctgtgtttattttctgctttaagtgcttatgataaccctatgaggtggataccatcctgatcttgcagatgaggaaactgaggcacattaatgttaaagtactcgcctaacatatcagtaccagtaagtgatagaggaatgtttctgactcttatagtagggccagaatctaacctctacactgactttgaagaaggaaaaggacttaaaatgtgatacattttaccaagaaggcatcacatgtgaaagcacgtgttgaatctattaataaaatcctgagttagcaacctccaagtatttggtacagtttaagcacatggttgggggagtgttgggctattttcctgaaaggatgaagatctaactagatccctagttagagcagagttttagaaactttagcctgggacattgttgggaccattaaaaggtgagaggctgcaagtgggaaaatcagtgagatggctgttttaagtagtttggggcagaaatgacgagactctgctggacacagtggctaaagcctgtaatcccagcactatggggtcaggagtttgagaccagcctagccaacacattgaaaccctgtctctactaaaaataaaaaaaaattagctgggcatggtgatgtgcgcctgtaatcccagctactcgggaggctgagggaggaaaatcgctggaacccgggaggcagaggctaatgccactgcactccagcctgggtgacagagcaagcgagactctgtgtgtccacccacccctccccgcccgccccaccaccatcaccaccaaaaaagaaagaaagaaagaatgagactaatggtgaattgttcatggggatggagaatatgatttatattggatagatgttaaggaggtagactaggacatgctgaataatgttctagtctacctccttagaagaacacattttaggaaaatttagatgattctcctggaaagaacacattttaggacaatttagatgactccatggaacacatacaaactctggtagatggctacaaggaaatgaagaaaaaaggataggtcagaggggagaatttctttaaaggattgacagacttggggaaaggcacagagaaagtgggaagaatgggattctcagagtttttaatgtgggtgaagaataaggaattacagttttaagtgcagaatgagaatcttaagattttgttggacttttcagatactgcaatcttttaaacatgagaaagtacaggggccgggcacagtgactcatgcatgtaatcctaacactttggaaggctgaggcaaacagataccttgaccttaggagtttaaggccagactgggcaacatggcaaaaccttgtctgtacaaaaaaattagcctggcatggtggtgcatgcctgtagtcacagctacttgggaggctgaggtgggaggatcacttgagcccataaggtcgaggctgcagtgagctgtgattgctccattgcactccaaccagagtgttagagtgagaccctgtctcaaaaaaaataaagtacggtacttgagtgtagattagctatgaagatctgtgtatcattagagctaatagtttatatttacacaacaagtcttaggataagaggcaagaaggagaacaaagcttcaactttgactttctgccagaggagagtgagcacaatatctggggcacctaagatgtagcatgtttccgaaagtgggaggtttaggactgaggcaagaaaggcttaaaggcagtgactttgctaagcagatgaagcgtagttgttaggagatggcatctgtgggctttctaaagtcatttagttgtttattgttttctcatctaacgcacagttgtctaatcttttggcttccctgggccacactggaagaagaattgtcttggaccaaacataaaatacactaacagtaacaataactgatgagctaaaaaaaaaaaaaaaaaaaaagtccatgcataatttttatgatatccgccaccacagataagcaaaaaagttctcgtattcagatggatggatgccagtgatctaaagggtgatagtctgtattgtgccatttagttctggattatgttttgtcttaatactatgtctgaataccctttggactacattacctgtttgaaaatagctgttatgtgttttctttttcatatagcattggtcgatttttgtgtaaaacatggagtttctccaacttaaaggggaaaaagtaaaaaataagtgaataaataagtaattccacccagagattttgaagtgacttgtgctgtctgttttcatagctcttcaggaagctgcagcaaggtttgaggaattaaaggcccaaaaagagctaagacagctgcaggaagaccgaaagaatgacaagaagccaccaccttataaacatataaaggtgaggagaaaatcttgggggaccttctctagaagagaaatggaatagctggctcttcccactctgttcatgacaagaacggaagcacaagcatagttcgttttaggtagaggtatgagcttaaaagaagatcagaaatagccgggcacggtggctcacgcttgtaatcccagcactttgggaggccgaggcgggcggatcacctgaagtcaggagtttgagaccagcctggccaggcaggtgcctgtaattccagctacttgggaggctgaggctggagaattgcttgaacccgggaggcagaggttgcagtgagccgagatcgtgccactacactcaagcctgggcgacagagtaagactccgtctccaaaaaaaagaagaaaaaaagaaacaagtaccagaacaccattcctagcgcattgccaggattcccagtgtcaggagaattgattttaggtggacctaacctttaacctacctagtgaaatagtcatcaccattatcatctgggtccagtggagcctttgtattttaaacatttttatgtcatttatatgaataattgacagacataaaaataaagagacagtggagaacaaatgtattagaaattttagtgttatgttgttgctaaaataattgcagttttatcattacttttaatggcaaacctcaattacttttgcaccaacctaatatttactaaatcctttttacaaacctctttttatcagataagttagttgcgatgctcaaatatcataaaacatgaaagaatattgttaggcctgttgagaaaaggagattacccaggttgttcttgtaaaacatctttgatggcattgttcctggatgagaataccctatttcttttttgttcttagaaatgcattatttgttcacttatcctttgtgtgtgtgtgtgtgtgtgtgtgtgtgtgttgtttttttgtttgtttgtttttgagatggagtctccccctgtctcctaggctggagtgcagtggtgcaatcttggctcactgcaacatccatctcccaggttcaagcaagtcttctgccgcagcctcccgagtagctgggattacaggcgcacaccactatatgcggctaatttttgtatttttagtagagacggggtttcgccgtgttggccaggctggtctcgaactcctgacctcaagtgattcacccgccacagcctcccaaagtgctgggattacaggcatgagccaccacgcccggctgtgtgtttccaaagactgataatctgagatgctacttggagactaatttgaccaccatcttgagaatctagtatgtttaagtttgtctcaaatattggatcgagcatagttaaactgaaaaactttcgttgtttgtcagaaattcagattgaactagatgacttggatttttatttgctaaatctgataaccctaccgaaatcagaccttcaagatcgtgtctccagtgttttatacttgcttttttatttttaaactcctttcctcaggtgtagtagacggtcttttatactttttttaaacgacaatgcagtactttgggtaatgccgtaagaaatctaaagtgtgacagtttcagtatttcatcgtgcttatatgtgattccattgtgcttcccttgtcttttttttttttttttttttttttttgagatggagtcgcccaggatggagtgcagtggcacgatcttggctcactgcaagctctgcctcccgggttcaagccattctcctgcctcagcctcccgagtagctgggactacaggcgcccgccaccacaccgggctaattttttgtatttttagtagagatggggtttcaccatgttagccaggatggtctcgatctcctgacctcgtgatcggcctgccttagcctcccaaagtgctgggattacaggcgtgagccactgcgcccggcctcccttttcttattatttctgtcttctttagcatagttgtgaattattgatgagttagtaataatgtgtaatgatgaattagtaagttgttacaagatagaggaaaagtaagaacactaaaattccataccgtgtcttagatttagtctgatggacttacatggtatttacaagacagaatcagttttgttctttgtttgttcctttgagacagggtctccctctgtgacccaggctagagtgcattgctgcaattttggctcactgcaacctccgcttcgtgggcgcaagtgattctcctgcctcctgcctcagtctcctaagtagctgggattacagacatgagccaccaacgcctggctaattttggtattttttgtagagttggggtttcaccatgttgcccaggctggtcctgaactcctcagctcaaagcaatccacccacctcaacctcccaaagaactgggattacaggcgtgagctacgacacttggcctgaattttattcttttaaataagtatattttctttttgaactttggaagacctctaaaaagggataaaagtcataaacactgcttctgaagtctttttttttttttccccctgagacagagtctcactctgttgcccaggctggggtgcagtggcgtggtctcagctcactgcaacctccatctcctggattcagcccactctcctgcctcagcctcctgagtagctgggactacaggcattgtgccaccacacctggctaatttttgtgtttttagtagagatggggtttcaccatgttagccaggctggtcttgaactcctgacctcaggtgatctgcccgcctcggtctcccaaagttgagcctcccacggtgagccactgtgccaggcccagttttttttgcttttttctccccccctttattagagatgatgatttcactatgttgcctaggccgatctcctggcctcaggttgtcttcccacgttggcctcccaaattactgggattataggcatgagctgccactcctggcctttaaattgttactttaaatgtcataaaatatccataccaagattagattaaaaaaagaacaaaacgaaaaaagtcataaactgttaatccttacaaatgattacaacttctgaaattaagaatttcaaaacctataattggatctaaatgagtctcacaatgtatgtgaaaatatattcttggaacatagtcgttaggcctcagaaatggaaaataattctattcacatagtcctgagggtcagataacagcaaggtaggcattttagagttaacatattaaccatattgagctactgagagagcagtttcctgtgagtgatctcatcaagaacttagaggccaacttctttactccatttttttttttttttttaataaacatttccaggaaaaggatctagagcaggcattggcaaactatggttcatgggcaaatgtggtctactgcctattcttgtaatactcttgaactacaggttgtttttgtattttttagtgattggcaaaaaagagattttgtgacacataaagatgatatgaaattcaactttcaatcagtatccagaaaattttattggaatacaggcatgcttcttcatttacatattacatatggctgcttttatattacagtggcagagtcgagctacatgtggagatctatggcctgcaaagcctgaagtgtttactttctgaccctttacagaaaaagttacttaactcctgatctatagtgagatttacttagaattacatatccatgtctttgttcttaaccatgtgggatttgttttggtttgcttttggtttacgatgtgataagtacaaaacttatttttggattaataacaggttagatcagttgataagaaacaatgattaaaacatatattttccagcctgggcaacatagcaaaacccagtctctacaaaaaatacaaagaaaaaaaaaaatttggggtgcctgttgtcccagctacctgaatcacctgagcctggaaagtcaacgctgcagtgagctgtgattgcactactgcactccagtctgggggacagagtaagaccctgtctcaaaacaaaaacaaatatatatttgtagagagaaaagaagtagcatgaacctttatgtgtatttgggaagggttcaagtaaaaatatttcgaatcagaagtgaatgttcaaatgccctattcaggacttgtagtcttgggtgactgagattagctgttgttgtctgtccccttagaatttgccttagacattgtaagccttatgccttatggcttccagttgcatgtgttggggatatttctccattagcaagaagtttccaaaccttaccagtgttttgatgaatctaggaacagatctggcagtgagacctacatccattttccccacggacagcatcttgctggagtgtcttgcaggtctatacgatcctcccactgcagcttcctgagtagctggaacctcaagcacttgccaccatgcccggctaagctttataatttttttgtagacatagggtttcattgtgttgcctggtctggtcttgaacttctgggctcaaacaatcctccagtctcagcctccgaaagtgctgggattacagatgtgagccactgcacctggcctcctcctgttaaatgttgatagaaaaatggtttgatggcagcatatatccagattgtagatttcataatattaaaggggagtgggcaaataataaaatgcaagaaatgaaagcatttgaaaatttagaggacagaaatgacttttaagtaagtgattttaggtgtactggaatgagtaatctagaatatttgatatgagagaaacaatcataagggcattatataagaaaggaagaaagaatttaatatgtctaccatgtttaagaggcagctaggtgctgtactatacatatatttcttattcttacaatagtcttgcaagtaatttattcaaaatcacacagttcctgaacagtcaaaattttttgtgcggtttgtgtcttagaagactaaatttgactgttcccactgaaataatatgaaatgaggggagatacattctcatgcacaaatccattattgtactggaacatctattgtctttccttattgttgctagtatttgttaaaacctctacattaatggctttggtgtcacaataactgtttgaccttcatgttttaactcaccaaactttcactgtgtttttgagcactagcaccacttctaaattaatccatgagtgacattgctatagtccttttaaaagattttaaattataagctgggtgtggtgatacctgcctgtagtcccaactacttgtgaggctgatgcaggaagcatagaggaactcaaattacacacagatgatttcatgccatttatttgccacttaagaacagtgcttttgccaggtgtggtggctcacacctataatcccagcactttcagagaccgaggcgggcagatcacctgaggtcaggagatcacaaggtcaggagatcgagaccagcctggccaacatagtgaaactccatctttcctaaaaatacaaaaattagccgggcttggtggtgtgtgcctatagtcccagctacctgggaggctgaggcagtagaatggctagaacccaggaggcagaggttgcagtcagccaagatcccgccactgcactgcagcctgggcaacagagctagactccctctcaaaaaaaggaaggaagaataatgcctatttttttgtagcagcaaatgtgacaccaacatgtggcaatagcagaaacctagtttatagttcacctggcttatcagctttgaaaattttttttttttttttttttttttttttgagacggagtctcgccctgtcacccaggctggagtgcagtcacgcgatctctgcaagctccgctgcctcccagtttcacaccattctcctgcctcagcctcctgagtagctgggactacaggtgcccgccaccacgcctggctaatttttttgtattttgagtagagacggggtttcaccgtgttagccaggatggtcttgatttcctgacctcgtgatccacctgcctcggcctcccaaagtgctgggattacaggtgtgagccaccaggcgcggctgaaattattttttaaaatgaatttcaaaaaaatttttaaagttcatattttattttattttattttattttattttattttattttattttattttattttttgtgaccgagagaccgagtctcactctgttgcccaggctggagtgcagtggcacgacctaggctcactgcaagctcagcctcccaagtagctgggactacaggcgcccaccaccacacctgtctaattttttgtatttttagtagagacggggtttcaccgtgttagccaggatggtctcaatctcctgacctcgtaatccacctgcctcggcctcccaaagtgctgggattacaggcgtgagccaccgtacctggctcgtattttatttttttgagatggaatctcaacatatcggccaggctggagtgcagtggtgaaatcttgtctcactgcaacctccgcctcctgggttcaagcaattcttgtggagttcatattttgtatgtcaagtgaggctctgtttttatatgaaactaagtgttgatagttcaaaatcatgggaaatgtggctgcaacttcaaggaaaaaaagtttgcctttttcaggacgtgaattgtcttctgctgacttgttttatgcggtgtactttgtgttacttttccaggtaaaccgtcctattggcagggtacagatcttcactgcagacttatctgaaataccccgttgcaactgtaaagctactgatgagaacccctgtgggatagactctgaatgcatcaaccgcatgctgctctatgagtgccaccccacagtgtgtcctgccggagggcgctgtcaaaaccagtgcttttccaagcgccaatatccagaggttgaaattttccgcacattacagcggggttggggtctacggacaaaaacagatattaaaaaggttagaaaaagctaaattaccatatactttctcctctttgcagttgcttgatatcattgatccttgacattagaaaattcatcatagaagaaaataacacagttaataattaaccttattgttgtgtcttgccatatccttctaccgtttagaggcttacgaatggatggttttgatctcccaagtcctttgtattgatcatggtcactgtgtaggaggttggaaaaaatgggacattcatagagatgctatggctttgtttgcttttttgtgaatatcctacagctggtaattaagagagatgacagtgagcacatgatacagagacattgatccacctactaataaaacatttttagtgaggaaaaaacaggtctggcttcatgaaacatgaaggataagaaggttaagccttattggatgaaaatgcagtcatgtcttcaacttaaaacttggcaggatctctaagtttctaataaataaataatattgtatagtcttttttttttttttaataaaataagccttattctggttacattttctgaagaattttattggtttccaggaaatgtagtgtatatgggttggcgtttagtcatttgctaagtagttatttttatatttactgtatgtgccaggtattgtgctggggatgcactaaccaagacgagagatatggcctatactttcataaaatttacatttcggagggagagaaatattgaacaaatcatctcccagtgtgaaagtataaagggctctagagatgtgtgacaaaggaactgaaactagtttgtctctgatgatattatattttattttatttattttttgagagagggtctcactctgtcgcccaaactggagcgcactggtgccatctccgctcactgcaaccttcaacttccaggctcaagtgatcctcccatctcagcctcctgagtagcagggactacaggctcgcatcaccacgcctggctaatttttgtattttttgtggaggtgaggtctaaccatgttgcccaggctggacttaaactcctgggctcaaattatcctcccagagtgttgggtttacaggcatgagccatcactcttgacttgtgaggctattttaaattgagacttgaaatataagtagctgttgacccaggcaaggtgcattaaagccctgcaggttaggagtgaacacgtgtgaaaagccagagtgactgtagcataatgaatagggaggatggtactttgaaatatagagcagagcaagcaccaaggaagatgaacatagtttatttggggaagccaattctcgggctctggggcaggtagagattggccatccatctctctttataaggacgctctagtttacttactaatcttccattctggaggatctttagtatccagtgtatcctaatctttctgctgctgacagtggtaggagtaaggaggtgtttctcattatcaaatagttggggatcgtaaagtaattatgtgtgcctaaaattatactcatgtaatctgctttgtagaatgtgatgttttcattaattttttaaaaaaatgtatacatttggataccagtgtccttttttgccattaagtcaggaggtatttcttgttctagggtgaatttgtgaatgagtatgtgggtgagcttatagatgaagaagaatgcagagctcgaattcgctatgctcaagaacatgatatcactaatttctatatgctcaccctagacaaagtaagtaatgggaaatgctgttttcactgttacaagattgtaaatttgtgttgtcccagccatagtatttgtaggcatgtaacgcagttcccaaggtagggtcttttcccatacccattgggattgctggattggggttctggagtaggtaagagtgctcattttctgggtattcatggccagaggcaatacagcagcttttagcattgtttttgaacaattcaatgaaaattggagcttatatctttgagtattttttctacaggattacaagtttgaactcagaaaagtacataattcttttttattttattttacagttgagaaaattgttaaatatttaattattttactgataagattatgtaaatttttttttaaaattattttgagacagagtctcgttctgtcacccaggctggagtacagtggcatgatctcggcttgctgcaacctctgcctcctgggttcaagcgattcttctgcctcagcctcccaagtagctgggactacaggcatccgccaccacgcccggctaatttttgtatttttagtagagacaaagtttcaccatgttggccaggctggtctcaaactcctgacctcaggtgatctgcctgcctcggactcccaaagtgctgggattacaggcatgagccaccgcacctggccttagtttttataataaaaccctttcttggtatttacctttgtaaacatttctcaaattgtgcactaggatttgtgagatcttcacttccagatattctgatcttactttgggattgggactccgcattagtatttaaatctccttaggtgatttctaatgtgcatctgggttgaaactacctaaatagaaagtgggacaagctgctatttgtagggcagtggtcctcaaacttcaatgtagtcagaaacccctggcagccttgttatatataacgcagaatgctgcaccccacagtctctgctttagtgtatttgaagcacaacccaggaatttgcatgtctaacaaattgccaaatggtgatggtgctggtccagggatcacactttgagaaccaaagttctttgggatcttttctctgagaggttcagtctttacaaatagaaactccaacttattagagagaatagtcaaattttaatccacagcagaggtctcaggaagtctgatgtgtagcttcttttggaattctaggaccgaatcattgatgctggtcccaaaggaaactatgctcggttcatgaatcattgctgccagcccaactgtgaaacacagaagtggtctgtgaatggagatacccgtgtaggcctttttgcactaagtgacattaaagcaggtaagaatcatttcaggattctgcagctgacatctgaatttcagggcttttgttttttacaaacagcttcctcagattataattttaaacatttctatatgtaccgttctctggaattaagttcatttacatttttgtgcaaccatcaccaccatccgtctccagaactcttttcatcttcccctgctaaaactctatacctactaaacactaagtccccattcttctttttcttcacagcccctggcaactaccattctactttctgtctctgaatttgactactatatgtacttcatataaatggacaatatttgtccttttctgaccacctcatttcattcattcattgattcatttttaatgtttagggacagagcattgctctgttgcccaggctgcactacagtggcaccatcacagttcactgcagcctcaaactgggctcaagcaatcctgctgcctcagcctcctgagtagctagggctataggcacatgtccccattcccaggttttttgttttttgttttttttttgtagagacggagtcttgccgctatgttgccaaggctggtctggaactcctgggctcaagtgatcctcctgcctcagcctcccaagtgctgggattacaggcatgagccacctcgcttagcttggctcatttcttttagcacagtgtcttcggaacatggatggttttaatggaacaaattttcacattcatatgaacttaccactaataggtttgctttagaaactactagctcttcagtctcctttctcaccttcctgaagttgctcttcttccactttataaaccaaagattgatctctcactcttccatatcttatgggttatggacccaaggctattttaaaaataaaccactgggtgtggtggtatatgcctgtagtctcggttattcaggaggctgaggccagaaatcgcttgagttcaggagtttgagaagcagcctgggtagtatcgtgagaactctgactcttaaaaacacacacacaaaacaacaaaaacctctcaacctctaggatgtcaaagaacaggatctttggagaattcactgctctgtcatggctcacctgggtgcttgtctctctaacggggtagcgagatggttgtaaccaggacaaatagtaagaagctaatttgaatcgaaagtaaatctggtatggctgagtggtttgacagtaaagttatgtggtagatattttccataaattaaaggatcttaatctatagcttcaaggttttgatacaattattttaaacatatatacctatgcatgtaacaccctccaaattgcatgcttttttaagtattaaaatttgtggctgggcgcgatggttcacgcctgtaatcccagcactttgggaggccaacacgggcagatcacgaggtcaggagatcgagaccatcctggctaacatggtgaaaccccatctctactgaaaatacaaaaaaattagccggacgtggtggcaggcgcctgtagtctcagctactctggaggctgaggcaggagaatggcgtgaacccaggaggcagagcttgtagtgagccgagatcgtgccactgcactctagcccgggcaacagagggagattccatctcaaaaaaaaaaaaaaaaaaaaaaaatttgtataaacgttgtacattttgaaatgtacaagaaagttatgatttttcaaatgtagttttgcaaggatatgagcaaaacagttaaaatcagcctcttatactcaaactgggatagaactggcctaggtagtctgtaatatacagtaatatagtctaattactgttgaagcagaatcccatttgaatgttctggaagaccttagttctcctttgctcagtcactgttgtcctcaggaagcattgatcaagataaaagaattagaatgatatttgttcagatcttagtctgtttttgtgtgtgtttgtttgcttgcttgtttgttgaaacggagtctcgctctgttgcccaggctggagtgcagtggcatgatctcggctcactgcaacctccacctcgcgggttcaagcaattctcctgcctcagcctcctaagcagctgggattacaggcatccaccaccatgcccggctattttttggtatttttagtagagactcctgacctcaagtgatccgcctacctcggcctcccaaagtgctagaattacaggcatgagccaccgcgcccggcctgtgttttaaatttaatctatgggacttctcacactcagtgtacttttttctctacaatttaaatgtgttgtccaggagtctttcagactttttaggttgtgacaatttttagattttaaaatttgagccactagttactttcgggttttgcgtttgtttctcataatgttttacatgatgacaccaaggacacttgagcatcactgtgcactgcactctgcttatttgagactggtttttagttgcagatttatttcaagtttttggaatgggtggtttcagagtatattgtttagatttctactttgtaacaggagtaattcaataaatgatacggaataccagatacgattctaagcatattatctcatttaagccttgcaaaagtgctgtaaagtagatgatattatacctatgttacttttatccttggatgtcacacctctctcattcttttctccctttttctctctaatcgccccaggggtggagaggttcctctatattaaatcaatataaatatagttcctctataataaatcagtcacatgatttagttctactatgtctgctgagtgctgatagtcccattcttctacttagaacctgcagttcatgtccatggggatgccctcctctgccatgtctagccacaaatttctcttctttttttcctgtgttcatcagctcaggtagcttggtgttgaaattctcagactcttcctctcctcacttgactttcagtctgcataggttcaggatggggaaaatgagacaggatgtgctaagggacaggcagagtgcctatcagagctgaggccttcattcaacttcctgggcccttcacatacctgcaacttactgtctcccaagtgtcccatccctactcttgtttatctcttctctcatgctctttgccatgcccagtaactgaagatccatcaatgattgctgcatattgaactcttttctagaatggtatcactgtttagtttatgagcactgatactttctgatttaatttagcctctctgtgattacacttacatagtatatgttcagtgagcagcaagttatgacaagtatcctgctttcttttatttgtgtataaggtacagttgtattataagcacatcgtatctataaaattttagttatctatccataaatcttttattaagaaaaagacagtgtggggctgggcgcagtggctcacgcctataatcccaacactttgggaggccaaggtgggaggatcacttcaggagtttgagaccagcatggctaacatggtgaaacaccgtctctactaaaaatacaaaaactagctgggcgtggtggcaggcgcctgtaatcccagctactcaggaggctgaagcaggagaatagcttgaacccaggaggcggaggctgcagtgagccgggatctcaccaccttactccagcctgggcaacagagtgagactccgtctcaaagaaagaaaaagaaaaaagaaaaaaaaacagtgtgaatagaaccacgaaagattcaatccagttaagttcaggcatgagatgggaaacatgaccctcccgttaacattggtgagtctcactcagttcctgcaagctccttatggcatgagcctcatcaggccgtggataattctgctactcctacagcatgaccctaacgtagctgctggtattgtgaacatacttgataaagaaatagtgataagaatgatttcctttaacattcgatgaaaaactatgtatagcagtctcactgataaaaggtatgtcagtctgcaaagggaaatcttcctaagaattgacagtttttaatatgaatgatggttaccttatacattaactgtaaacattacccctgtgataggcaacctcttcacatatttatgtaaaattcttatatttggtaggcctcccataactggcttttagttatgagttttgagtttgaatgtttatttcctctcacagttttggtgaaatggacctttgacagaaagagagaaagaggacagtttgcctgttaatttgagtacctttttttaaagtttacacgttactgctatgtgcattttgtcatattgtctcaataagcttgtcagatttctccattttaaaatgggctgctcaggattcagattaccctgctaagtctgtgacgtagctggatctacaaccagtctgtaatctacagatttctagtgttattctgtactgagatgcctctccagagtgctgccaggtaacatgtgttcacctgagaacagacaaacaggttttcctcatacttgtattcccagggcctgacacattgataagttgttttttgtttgttttggtaatgaattaacatattttgaatctgaatggttaataaacaaatgaaaaacaacttgaggtaattaacacctctggaggaagagttatcttaaatattacttgttaagccatttaagttttctctgttaaattgtattacctgattattaatgttataagattagaattaattaaaatataggattagagctaaattctttttaaaattaatctgttctcttgggagttggtatcctttgtaattaatacagaaataatgtaattaaaaccatagatattaatattttcacggtctcttatgcaggcactgaacttaccttcaactacaacctagaatgtcttgggaatggaaagactgtttgcaaatgtggagccccgaactgcagtggcttcttgggtgtaaggccaaaggtaccacccttctagacttctgctttgggattagtggtgcggtcctccctccctaacagtgttagggcagtctacattttaagaagaaatctctttgaaattaatgacattcagccaggcatggtggctcatgcctgtaatcccagcactttgggaggctgaggtgggcggatcacctgaggtcaggagttcgagaccagcctggccaacatgatgaaaccccatctctaataagaatagaaaaattagctgggccgtggtggcatgtgcttgtagtcccagctactcaggaggctgaggcaggagaatcccttgaacccaggaggcagagattgcagtgagctgagatcacaccactgcactctagcctgggcaacacagcaagactccttctcaaaaaaaaaaagaaaaattcaatgacattgaataggtgttgatagggccacttgcaattcactaagcattcggctgatcaattatataagaggtttttggggatattgttgaagtgttttgggccatctgactttaattggtgctacttttctaactaataatgctgtgaaataggaccttataaagaaggttagttacctccctcgtcttgatctcacatctcctaataagccatatagattcttggtatatctgtgtctgtccctgtctttctctcactttctctttctgaagataccaaaaaatctgcagtttaagcttctaaatgtagcataacatcatagataaaagtagaactcttaatctcaccattataaaaaagtataagcattgttgtgtcttcctgtttttttagtatgcactttctgaataattgaattctaattctgtaactgttaagtatcatttccatgtctatattctccttattttttttgttgttgttgttttgtgtttttttttttgaggtggagtctcgctctgttgcccaggctggagtgcagtggcgcaatctcggctcactgcaagctccgtctcccgggttcacgccattctcctgcctcagcctcctgagtagctggaactacaggcgcccgccaccatgcccggctaattttttatatttttagtagaaacagggtttcactgttgttagccaggttggtctcgatctcctgacctcgtgatccgcccgccttagcctcccaaagtgctgggattacaggcgtgagccactgtgcccggcccttatattattattttttaaagtccttgctgatcatttttagtgactgtcttaatttttttatataatggatggacatactagatgaacatctggataattcaagatttctgtatcataagtaacagcacagtgaaaattgcagtttaattttgatacaaaataaactatatagtgacttcaattgagtatgttccatatgcctttttgattgtgaagctcaacattaagaactgaaaaatgcaaattaacatagaagccaataagaaaagagtaaataaatttttttttttttttttgagacggagtctcgctctgttgcccaggctgaagtgcaatggtatgatctcggctcactgtaacctccgtctcccaggttcaagtgattctcctgcctcagcctcccaggtagctgggattacaggcccctgccaccacacctggctaattttttgtatttttagtggagatggggtttccccatgttggccaggctggtctcaaactcctgacctcaggtgatccacctgcctcagcctcccaaagtgctgggattacaggcgtgagccactgcgcctggccagaaatgaagagcactcaatgatcattttttaatcttgttaaataaggagaatcacctctatattatactggattttattgtgctttttgtttagttttgttggtttaacggtgttgttccttaagatgttgacttgtttcctataaattaaaatagtaactcagtttaacctgtacttaatggtattaagtgtagtgcggatgtcagtttcagcatccttgatgtctgcatgggatagcatttcacaggagtcagtcagaggtagatgctagagaggtcactgtgtgctcttagtagatactggtctgtcagaatagggtggacctccattaagccttacagattggtcctggatgtttctgggttaaaatgaagaatgtgataagatgatttggtgaccaagtgtgggctgcagggaacaaagagagaacatctgctggctgctccagggtctgccttgggagtggtggacctgaagctaatttgacttgatgtgtagtcttattgacggcagggaccatgaattaacttttttgtgtcttaacacattgcttatagtaagttcagttatgctttgttgaatgaacgagaaataggcatgtgtacccacacacagaagtctagtttagttctgaaagtagacgaatataaaagtgaaactttggccaggtgcggtggctcacgcctgtaatcctagcactttaggaggccaaagcgggtgggtcacaaggtcaggagttcgagaccagcttaaccaatatgctgaaaacccgtctctactaaaaatacaaaaattagccaggagtggtggtgggcgcctgtaatcccagctactcaggaggctgaggcaggagaattgcttgaacccagcaggcggaggttgcagtgagccgagatcgcgccactgcactccagcctgggcaacacagcaagactccgtcttgaaaaataaataaattaattaactaataaaacttatgaaaggcatgtcatttaacaccagccttatggatcagcaaaaacacaaagatttttgtcttctgttttgttcaggtggcaggagtagttgatacaaaaattattgctacgtatctgtgatgtaccaggtacctttcctgcattttatcttcatgacaatctcttttcccagagaagagaatgaggctcagagagggtagttaacccggttaagattggtactaatgtgttcacagaatgctgactgttcaatatctgacctgtagaatcaacccattgccacggaagaaaagtcaaagaaattcaagaagaagcaacagggaaagcgcaggacccagggtgaaatcacaaaggagcgagaagatgagtgttttagttgtggggatgctggccagctcgtctcctgcaagaaaccaggctgcccaaaagtttaccacgcagactgtctcaatctgaccaagcgaccagcaggttggtgccaaaatccatttgtaccgctactcgttctctccatcatactcagggtctcatgccatttgcatcagccttgaagaaagtgccatttggtctttccatgcataattttgaggggtatggtctattttcttattttggaaataatgaaagcaaaggcttagaattcttagttatgaagaatgggacagcggtgcacttgctgtgtttcaggtcctttacttacagtcatgtttatttcattcccccagcagcccataatggttggttttcttccataatgcatgtgaagaaacagagtgaggattggggaggtgatctttcacacatagatagaggagctggattgagagctgggtttttgactccaagactattaaatcatgttgcctttctagagaaagaaagattgagatagtaaagcctttaggtggttctagtcagtgagagatggattgccacccttttagcacttcctaccttgctcccctacgcctagtgcagtctccccccatgcagagtagacttttttcctctaaaggagatttggttgtatcagttaatacatgagaaagctgctcaggtggatgtggtacccaggaaatttgtagttgaagaaattgagaacctttgagtagtgatttggggttagagaattttagggatttggatatgccatctattttaatgaacaaaaaagagaaaccagtagggagccattccagggtgaggagattatacattactagtgacctgcttccaagagttgcagaacgttaagaactttagggtataagtaaaaggaatttgtccccaaattggctttccttcactgtatattggccagggtcatgaaataaaagaaactgaggtaggatgagggcaaggccatcacattgacctgtcagcaccaggaagtagaattgtttcagaatcaactgctcagggtcgtcactggcgcaggctatgatagaaccaatcttgcctgtgtgccaggagtgggagctggtgtagttgatttgaaggtggaaacactgtccctggtcaagaccctcaggtttcatgaaatgtggggaggcaggtaaaagcttaggtcagctttgggtcttttctactgattccatgtgaacaacatataacgtgctgtgctgatctcaagacttaaaatagagcaaaggtaaatcttccatttttcatgattttatatcttttctattactgttaatagcaaataagcaggaatctaaatcaccaggatatttctctttgagttgcttatttaaaagctgtatagtacaaatggagattgcaaaaatataaaagtaatatcttaagtttcatgtaaaagaaactttttgttgtccccacccccgcccccccctcacctccttgctggaaatagtcatagaaataccaatttactcttctgcttgtatatttagttgatagtagttgctatttgataattcgctgttactttatgtattctgtgcacaaaaagaagctggaattctggggcaagaggtggctggtgagtggcataagctctctgaagcagggacagtgtgaaggaaggtcatcatccacaccttcggactgtagcatagccttggcccatgtgatatgtatctcttttttcctaaacttttgatttacttctgtgttttcagggaaatgggaatgtccgtggcatcagtgtgacatctgcgggaaggaagcagcctccttctgtgagatgtgccccagctccttttgtaagcagcatcgagaagggatgcttttcatttccaaactggatgggcgtctgtcttgtactgagcatgacccctgtgggcccaatcctctggaacctggggagatccgtgagtatgtgcctcccccagtaccgctgcctccagggccaagcactcacctggcagagcaatcaacaggaatggctgctcaggcacccaaaatgtcagataaacctcctgctgacaccaaccagatgctgtcgctctccaaaaaagctctggcagggacttgtcagaggccattgctacctgaaagacctcttgagagaactgactccaggccccagcctttagataaggtcagagacctcgctgggtcagggaccaaatcccaatccttggtttccagccagaggccactggacaggccaccagcagtggcaggaccaagaccccagctaagcgacaaaccctctccagtgaccagcccaagctcctcaccctcagtcaggtcccaaccactggaaagacctctggggacggctgacccaaggctggataaatccataggtgctgccagcccaaggccccagtcactggagaaaacctcagttcccactggcctgagacttccgccgccagacagactgctcattactagcagtcccaaaccccagacttcagacaggcctactgacaaaccccatgcctctttgtcccagagactcccacctcctgagaaagtactatcagctgtggtccagacccttgtagctaaagaaaaagcactgaggcctgtggaccagaatactcagtcaaaaaatagagctgctttggtgatggatctcatagacctaactcctcgccagaaggagcgggcagcttcacctcatcaggtcacaccacaggctgatgagaagatgccagtgttggagtcaagttcatggcctgccagcaaaggtctggggcatatgccgagagctgttgagaaaggctgtgtgtcagatcctcttcagacatctgggaaagcagcagccccttcagaggacccctggcaagctgttaaatcactcacccaggccagacttctttctcagcctcctgccaaggcctttttatatgagccaacaactcaggcctcaggaagagcttctgcaggggctgagcagaccccagggcctcttagccaatccccgggcctggtgaagcaggcgaagcagatggtcggaggccagcaactacctgcacttgccgccaagagtgggcaatcttttaggtctctcgggaaggccccagcctccctccccactgaagaaaagaagttggtaaccacagagcaaagtccctgggccctgggaaaagcctcatcacgggcagggctctggcccatagtggctggacagacactggcacagtcttgctggtctgctgggagcacacagacattggcacagacttgctggtctcttggaagagggcaagaccccaaaccagagcaaaatacacttccagctcttaaccaggctccttccagtcacaagtgtgcagaatcagaacagaagtagtaccaatcaatgtcacatgaacaaacaagctgcccccagggtaccatttggggaggggaaatcttttctttctttcccccttaaaaaaaaacacatctgccccgaacactttcccactgttattctttcctcatatcccaacactcagaactcttgtgacattagccagtgggggcttatggttgtgtgaaccatgtatgaaaatccagtgggccccaaccaaggagacagacagacttgggtctctttcccccaacttttccacatggtcatcgtgaaataaaaagtccactctggagtcaagtatggaattcaattccgctggtcaggttggaaggtataggggctctcaaagcgatttccccaaccagacagagccccattgagggcacctaggaacccttgggaggaaatggtgttctttcaaatcagtggcgatttcctgagcattcacgtgttctaggccgggtgctagtcactgatgagagatacaggcctcatccctgtgagcctggattccaaggctttcaggaacctttgaccaggaagtaacaggaagttctgaggggccctggggctttagactcattttgaaatgtcctttgtggcaccagaagtggttgtgttgaggaagtgtctcttggctgcggtgtgcatgggtgcgtgtgcatgcgcgcacactcacagaggtctcctctatagatgcaagggtgctgcattgaggccagcaaggctgttggctgtggggtcgccgctgctgcttttgtctgggctgtgcagagtctcaagatcagtccttggaggagcaggtggtcaggggcagtcgggctctgtgcgaatgtagatttccagcagtggaagaaggcatttggcaagcttctctttctttgcttttgtttctacctatttttctctttgtacatgaatccaccccatccctatttccctaaaacactcaggtgctttcagatttcagagcctcgggcagtggacatagggaatctctggcaagctctgagctagacacaccagcttcaggaagagtaccagatcctgatgggaaatttcttttccccattccttttccctcctgagtggagggagtcctcttcttcgcctccctgagaattgctgtgctctgtattgagagcacctgcctgctgacttagctcaaaggcaagccagaacccttccctgaagactggcaagaggtggtgtttagagcaacgtccaggctaagagatgactcctattaactgctgattatctgttactgctgccctgagctggggcccaagggctgggaaatctgttggtgctaccctgccctaccattcacccagctcacagactgccaacaggaagtgctgtttggctagtttcctcccacttgtctacccctcctttgtccttagaccaacatgtttacctctctgctttgccaacttagccagcaggccatccccggccctaacgtctcctggccattatctcttagttatggctttcacgctctcaataggattctgtatttggtcccaatttcctcaagttcttattgaggttactcccatcaattccacggagggaacagtagttattatagaagcatttgcgctttatctaaagattaaaaatagaatctgcttttatttcccaaagtctgtctctgaggttgagacacttgaactcaggcagagggacgaggctgggcagggctgtcctgagtttaggggcctatccctgcatttcactgagacctcggaatctcctctgtgaattccacctgcctagttctcccctttcatcctctctctcttcccacatcatcaaagaggaaaagctctttgttcaaaaggaagagaaaacgtaaagcatcttattttcttttaaaagaattttaaaccatgaaaaagatatttttaaagaaattcaccgagaacattaaagttcattatattaagtatttatcatgtgtgagaataataaatatataactgcagctagtaggtccctttccctaatcttttaggtcatatgagtagggtttgcttggtgccagtcctgtgcccttttctctccagtcatctgtagttgtgatcagaaaaaggtatctgcactgcactgtcagagtctcctttcactatgttgtgtgttaaattaccgtagctctttgtttcatgaaataaactgtgaatttggggggggcggggggagggcgtgcaggccatgtaaaaattttccgtggagaagtttgattctaaagtagcttctctaaagtaggctttggtaggtaatcaacttgacagcagtctagatgtctcacaggacaggagggagtgagggaaaggggccatgattggctgctttgtggttttattttggttctttccattctccgccattcattggaggcttcgttccagacctgcctgggaaaacagcttctgagccattttggggagcagttcttcatctgaatggatggacatctgggcttccttcaagggccattgaatgggaactagaaaaccactggaaactagaaatttgagctattgggcccaccagtagcagcatgtgatactagatggttaaaatcatgaaagcagtcactatccaattagaagcagagtcacaacaactgttgggaaatgtgactcttggaggaaggtggggagggagtggccttgccagccctgtgggacgtcccctgaagtttgtaataagaccccttttccaaagggatgtgaattggagtgaaaaggaaatctttcatcttagaaaacttctggtccttaacgcagggtggtatttgggtatgtgcttggaaattgagatctcaagagtgtttgccttggagccagctccccaggaggccttttccagggacaaggcaaaagttgaaattctccatgggtagctagaaagccaatacatctagccctgctaagtcagaaaaagattatgaaaaatgttgaaatttacattcaaagcctcatttgcttatcttgctggagccaacccagtctaatagcaaaatagctgtcattgatacagaaacatcctcatttttaaatgtctgctttaccctgttactgagtttgagatgacttaaatcactgtgttgaccctcttctgaaccaaatctttagcattgatgaaaatagttattttattctttacatccttcaccccacactatggtcagggcatgaaacaccctgttgatcccttcccaggctcggcactgtctgctcactggagccggactcccaggttgtaattctaatgttgcctcatgagaacagaatggcagaaagtttagtcctgacagattcccccatagggagtaatgaggacagcatgaaacttggataggttttacccttagtccctataaggtggattttactaaggttttttaaatgatactgtcatcctcttggggtttatcagccaggttagaggagcccagtgtcctaacctctctcagatcatggcagagaaggagctgcctccagcccctttcttgctgagtttcatttgagcagttccatgtgtagacattccaagtcactgcttggtagttgctgtgggagcctgtcattggctatggccagttagttctcagctgagcttcctagggccagtgcaacagggccagaggctgctatagtgtaaattgaaataagaatagatcattgttttgtacacacacacaataaaatgtaatgatggtgctaatttcacggtataaataagcactgccaagggttgagggactggcagctcaagaaacccgggttcctgtttgggaggagattttatgtagaaaagtttgaggctttgttaaaagtggggagaaggaagatcctcagtgaagcctgcacccaaccctggagtggcccagtgcaatccagaggtggaagagatcctatatccaggtgaaggtggccattgagtttctcagggctggggccaccttgtccatagcctccgtccacgctgcctggagcaggttgttagagagctctggttgttgggtcttcctcagctcccttctgcccctctctacctcttccactcatggaagcccctctactgcttatgaagattaagggtagtattttctaaggaagtggaaagaattaaactagaaatccacaacctcggaagaagtgtttcgagtttaacatgcgctgtttctgcttatgtggttccttctctagagctgctttcccatggctttcaaaacatcaggttattgtggggcttcaggtgtaaggtcctggaagttcagcaaagtttcgtggacaagacatgggcacagagagtagaagcagaaataaatggttctatgttttcaacttccagggttggggcaggccagagcaaggcggtctcatcgaggtgggtgctacctgtgtgtgtgtagatgagtgtgctgaaggtggggagggcagcacacagcagctcatggcagagccgcctcctaggtcttggcaaagaggcaagctgacgatagacatctacctatattgttaagaaaggggtcggggggatcagccaaggtccatcattgcttttttgccgcgcccccccccccccgcccccatagattgtcagctgtaagtgaaactcctagtgaaaaagaggggagccctgtgttaggagtccccataaacatgtactgtaattctttgtatatagaaaaaaaatttactgtaaagtaaagtttaactttactcata

SEQ ID NO: 6-15 - skipped (10 entries)

SEQ ID NO: 16 - DNA, 18 bp, synthetic construct
  source 1..18: mol_type = other DNA
acaaaggctacaaaaagt

SEQ ID NO: 17 - DNA, 18 bp, synthetic construct
  source 1..18: mol_type = other DNA
ttctgacaaaggctacaa

SEQ ID NO: 18 - DNA, 18 bp, synthetic construct
  source 1..18: mol_type = other DNA
tgaaattctgacaaaggc

SEQ ID NO: 19 - DNA, 18 bp, synthetic construct
  source 1..18: mol_type = other DNA
aggaatgaaattctgaca

SEQ ID NO: 20 - DNA, 18 bp, synthetic construct
  source 1..18: mol_type = other DNA
ttaaaaggaatgaaattc

SEQ ID NO: 21 - DNA, 18 bp, synthetic construct
  source 1..18: mol_type = other DNA
acactttaaaaggaatga

SEQ ID NO: 22 - DNA, 18 bp, synthetic construct
  source 1..18: mol_type = other DNA
ataacacactttaaaagg

SEQ ID NO: 23 - DNA, 18 bp, synthetic construct
  source 1..18: mol_type = other DNA
aaagaataacacacttta

SEQ ID NO: 24 - DNA, 18 bp, synthetic construct
  source 1..18: mol_type = other DNA
gtcaaaaagaataacaca

SEQ ID NO: 25 - DNA, 18 bp, synthetic construct
  source 1..18: mol_type = other DNA
taagtgtcaaaaagaata

SEQ ID NO: 26 - DNA, 18 bp, synthetic construct
  source 1..18: mol_type = other DNA
taatttaagtgtcaaaaa

SEQ ID NO: 27 - DNA, 18 bp, synthetic construct
  source 1..18: mol_type = other DNA
tgttgtaatttaagtgtc

SEQ ID NO: 28 - DNA, 18 bp, synthetic construct
  source 1..18: mol_type = other DNA
aaaattgttgtaatttaa

SEQ ID NO: 29 - DNA, 18 bp, synthetic construct
  source 1..18: mol_type = other DNA
aggccaaaattgttgtaa

SEQ ID NO: 30 - DNA, 18 bp, synthetic construct
  source 1..18: mol_type = other DNA
tccacaggccaaaattgt

SEQ ID NO: 31 - DNA, 18 bp, synthetic construct
  source 1..18: mol_type = other DNA
tagagtccacaggccaaa

SEQ ID NO: 32 - DNA, 18 bp, synthetic construct
  source 1..18: mol_type = other DNA
aaaaatagagtccacagg

SEQ ID NO: 33 - DNA, 18 bp, synthetic construct
  source 1..18: mol_type = other DNA
cttcacagcgggaactta

SEQ ID NO: 34 - DNA, 18 bp, synthetic construct
  source 1..18: mol_type = other DNA
ttcctcttcacagcggga

SEQ ID NO: 35 - DNA, 18 bp, synthetic construct
  source 1..18: mol_type = other DNA
aggctttcctcttcacag

SEQ ID NO: 36 - DNA, 18 bp, synthetic construct
  source 1..18: mol_type = other DNA
ctagaaggctttcctctt

SEQ ID NO: 37 - DNA, 18 bp, synthetic construct
  source 1..18: mol_type = other DNA
tcgggctagaaggctttc

SEQ ID NO: 38 - DNA, 18 bp, synthetic construct
  source 1..18: mol_type = other DNA
cgacctcgggctagaagg

SEQ ID NO: 39 - DNA, 18 bp, synthetic construct
  source 1..18: mol_type = other DNA
tagatcgacctcgggcta

SEQ ID NO: 40 - DNA, 18 bp, synthetic construct
  source 1..18: mol_type = other DNA
agcactagatcgacctcg

SEQ ID NO: 41 - DNA, 18 bp, synthetic construct
  source 1..18: mol_type = other DNA
ttctgagcactagatcga

SEQ ID NO: 42 - DNA, 18 bp, synthetic construct
  source 1..18: mol_type = other DNA
gcttgttctgagcactag

SEQ ID NO: 43 - DNA, 18 bp, synthetic construct
  source 1..18: mol_type = other DNA
cacctgcttgttctgagc

SEQ ID NO: 44 - DNA, 18 bp, synthetic construct
  source 1..18: mol_type = other DNA
tcgtccacctgcttgttc

SEQ ID NO: 45 - DNA, 18 bp, synthetic construct
  source 1..18: mol_type = other DNA
aattctcgtccacctgct

SEQ ID NO: 46 - DNA, 18 bp, synthetic construct
  source 1..18: mol_type = other DNA
caaagaattctcgtccac

SEQ ID NO: 47 - DNA, 18 bp, synthetic construct
  source 1..18: mol_type = other DNA
gaaatcaaagaattctcg

SEQ ID NO: 48 - DNA, 18 bp, synthetic construct
  source 1..18: mol_type = other DNA
tggttgaaatcaaagaat

SEQ ID NO: 49 - DNA, 18 bp, synthetic construct
  source 1..18: mol_type = other DNA
ttctttggttgaaatcaa

SEQ ID NO: 50 - DNA, 18 bp, synthetic construct
  source 1..18: mol_type = other DNA
ggctcttctttggttgaa

SEQ ID NO: 51 - DNA, 18 bp, synthetic construct
  source 1..18: mol_type = other DNA
ctggaggctcttctttgg

SEQ ID NO: 52 - DNA, 18 bp, synthetic construct
  source 1..18: mol_type = other DNA
aagaactggaggctcttc

SEQ ID NO: 53 - DNA, 18 bp, synthetic construct
  source 1..18: mol_type = other DNA
ctttcaagaactggaggc

SEQ ID NO: 54 - DNA, 18 bp, synthetic construct
  source 1..18: mol_type = other DNA
cctccctttcaagaactg

SEQ ID NO: 55 - DNA, 18 bp, synthetic construct
  source 1..18: mol_type = other DNA
cggagcctccctttcaag

SEQ ID NO: 56 - DNA, 18 bp, synthetic construct
  source 1..18: mol_type = other DNA
aaaaacggagcctccctt

SEQ ID NO: 57 - DNA, 18 bp, synthetic construct
  source 1..18: mol_type = other DNA
cctccaaaaacggagcct

SEQ ID NO: 58 - DNA, 18 bp, synthetic construct
  source 1..18: mol_type = other DNA
ggggccctccaaaaacgg

SEQ ID NO: 59 - DNA, 18 bp, synthetic construct
  source 1..18: mol_type = other DNA
gccaaggggccctccaaa

SEQ ID NO: 60 - DNA, 18 bp, synthetic construct
  source 1..18: mol_type = other DNA
actgagccaaggggccct

SEQ ID NO: 61 - DNA, 18 bp, synthetic construct
  source 1..18: mol_type = other DNA
ttctgactgagccaaggg

SEQ ID NO: 62 - DNA, 18 bp, synthetic construct
  source 1..18: mol_type = other DNA
ccaagttctgactgagcc

SEQ ID NO: 63 - DNA, 18 bp, synthetic construct
  source 1..18: mol_type = other DNA
cacctccaagttctgact

SEQ ID NO: 64 - DNA, 18 bp, synthetic construct
  source 1..18: mol_type = other DNA
atgtccacctccaagttc

SEQ ID NO: 65 - DNA, 18 bp, synthetic construct
  source 1..18: mol_type = other DNA
tcagcatgtccacctcca

SEQ ID NO: 66 - DNA, 18 bp, synthetic construct
  source 1..18: mol_type = other DNA
gcaactcagcatgtccac

SEQ ID NO: 67 - DNA, 18 bp, synthetic construct
  source 1..18: mol_type = other DNA
ctgcggcaactcagcatg

SEQ ID NO: 68 - DNA, 18 bp, synthetic construct
  source 1..18: mol_type = other DNA
gtcagctgcggcaactca

SEQ ID NO: 69 - DNA, 18 bp, synthetic construct
  source 1..18: mol_type = other DNA
acaaggtcagctgcggca

SEQ ID NO: 70 - DNA, 18 bp, synthetic construct
  source 1..18: mol_type = other DNA
cacagacaaggtcagctg

SEQ ID NO: 71 - DNA, 18 bp, synthetic construct
  source 1..18: mol_type = other DNA
acaggcacagacaaggtc

SEQ ID NO: 72 - DNA, 18 bp, synthetic construct
  source 1..18: mol_type = other DNA
gagccacaggcacagaca

SEQ ID NO: 73 - DNA, 18 bp, synthetic construct
  source 1..18: mol_type = other DNA
ttccggagccacaggcac

SEQ ID NO: 74 - DNA, 18 bp, synthetic construct
  source 1..18: mol_type = other DNA
gagacttccggagccaca

SEQ ID NO: 75 - DNA, 18 bp, synthetic construct
  source 1..18: mol_type = other DNA
gtggagagacttccggag

SEQ ID NO: 76 - DNA, 18 bp, synthetic construct
  source 1..18: mol_type = other DNA
aggccgtggagagacttc

SEQ ID NO: 77 - DNA, 18 bp, synthetic construct
  source 1..18: mol_type = other DNA
agggcaggccgtggagag

SEQ ID NO: 78 - DNA, 18 bp, synthetic construct
  source 1..18: mol_type = other DNA
actcaagggcaggccgtg

SEQ ID NO: 79 - DNA, 18 bp, synthetic construct
  source 1..18: mol_type = other DNA
ctcagactcaagggcagg

SEQ ID NO: 80 - DNA, 18 bp, synthetic construct
  source 1..18: mol_type = other DNA
aattcctcagactcaagg

SEQ ID NO: 81 - DNA, 18 bp, synthetic construct
  source 1..18: mol_type = other DNA
ctagcaattcctcagact

SEQ ID NO: 82 - DNA, 18 bp, synthetic construct
  source 1..18: mol_type = other DNA
tttaactagcaattcctc

SEQ ID NO: 83 - DNA, 18 bp, synthetic construct
  source 1..18: mol_type = other DNA
ggcgttttaactagcaat

SEQ ID NO: 84 - DNA, 18 bp, synthetic construct
  source 1..18: mol_type = other DNA
ctgagaccccaaccccac

SEQ ID NO: 85 - DNA, 18 bp, synthetic construct
  source 1..18: mol_type = other DNA
aaatactgagaccccaac

SEQ ID NO: 86 - DNA, 18 bp, synthetic construct
  source 1..18: mol_type = other DNA
tgctcaaatactgagacc

SEQ ID NO: 87 - DNA, 18 bp, synthetic construct
  source 1..18: mol_type = other DNA
atatctgctcaaatactg

SEQ ID NO: 88 - DNA, 18 bp, synthetic construct
  source 1..18: mol_type = other DNA
taatcatatctgctcaaa

SEQ ID NO: 89 - DNA, 18 bp, synthetic construct
  source 1..18: mol_type = other DNA
tcctctaatcatatctgc

SEQ ID NO: 90 - DNA, 18 bp, synthetic construct
  source 1..18: mol_type = other DNA
ctgcttcctctaatcata

SEQ ID NO: 91 - DNA, 18 bp, synthetic construct
  source 1..18: mol_type = other DNA
atctcctgcttcctctaa

SEQ ID NO: 92 - DNA, 18 bp, synthetic construct
  source 1..18: mol_type = other DNA
ctaaaatctcctgcttcc

SEQ ID NO: 93 - DNA, 18 bp, synthetic construct
  source 1..18: mol_type = other DNA
acatactaaaatctcctg

SEQ ID NO: 94 - DNA, 18 bp, synthetic construct
  source 1..18: mol_type = other DNA
tcaaaacatactaaaatc

SEQ ID NO: 95 - DNA, 18 bp, synthetic construct
  source 1..18: mol_type = other DNA
ttacatcaaaacatacta

SEQ ID NO: 96 - DNA, 18 bp, synthetic construct
  source 1..18: mol_type = other DNA
tggctttacatcaaaaca

SEQ ID NO: 97 - DNA, 18 bp, synthetic construct
  source 1..18: mol_type = other DNA
aatgttggctttacatca

SEQ ID NO: 98 - DNA, 18 bp, synthetic construct
  source 1..18: mol_type = other DNA
gatacaatgttggcttta

SEQ ID NO: 99 - DNA, 18 bp, synthetic construct
  source 1..18: mol_type = other DNA
atatagatacaatgttgg

SEQ ID NO: 100 - DNA, 18 bp, synthetic construct
  source 1..18: mol_type = other DNA
attgtatatagatacaat

SEQ ID NO: 101 - DNA, 18 bp, synthetic construct
  source 1..18: mol_type = other DNA
agtttattgtatatagat

SEQ ID NO: 102 - DNA, 18 bp, synthetic construct
  source 1..18: mol_type = other DNA
ggggtagtttattgtata

SEQ ID NO: 103 - DNA, 18 bp, synthetic construct
  source 1..18: mol_type = other DNA
agtccacaggccaaaatt

SEQ ID NO: 104 - DNA, 18 bp, synthetic construct
  source 1..18: mol_type = other DNA
gagtccacaggccaaaat

SEQ ID NO: 105 - DNA, 18 bp, synthetic construct
  source 1..18: mol_type = other DNA
agagtccacaggccaaaa

SEQ ID NO: 106 - DNA, 18 bp, synthetic construct
  source 1..18: mol_type = other DNA
atagagtccacaggccaa

SEQ ID NO: 107 - DNA, 18 bp, synthetic construct
  source 1..18: mol_type = other DNA
aatagagtccacaggcca

SEQ ID NO: 108 - DNA, 18 bp, synthetic construct
  source 1..18: mol_type = other DNA
aaatagagtccacaggcc

SEQ ID NO: 109 - DNA, 18 bp, synthetic construct
  source 1..18: mol_type = other DNA
aaaatagagtccacaggc

SEQ ID NO: 110 - DNA, 18 bp, synthetic construct
  source 1..18: mol_type = other DNA
acaaaggctacaaaaagt

SEQ ID NO: 111 - DNA, 18 bp, synthetic construct
  source 1..18: mol_type = other DNA
ttctgacaaaggctacaa

SEQ ID NO: 112 - DNA, 18 bp, synthetic construct
  source 1..18: mol_type = other DNA
tgaaattctgacaaaggc

SEQ ID NO: 113 - DNA, 18 bp, synthetic construct
  source 1..18: mol_type = other DNA
aggaatgaaattctgaca

SEQ ID NO: 114 - DNA, 18 bp, synthetic construct
  source 1..18: mol_type = other DNA
ttaaaaggaatgaaattc

SEQ ID NO: 115 - DNA, 18 bp, synthetic construct
  source 1..18: mol_type = other DNA
acactttaaaaggaatga

SEQ ID NO: 116 - DNA, 18 bp, synthetic construct
  source 1..18: mol_type = other DNA
ataacacactttaaaagg

SEQ ID NO: 117 - DNA, 18 bp, synthetic construct
  source 1..18: mol_type = other DNA
aaagaataacacacttta

SEQ ID NO: 118 - DNA, 18 bp, synthetic construct
  source 1..18: mol_type = other DNA
gtcaaaaagaataacaca

SEQ ID NO: 119 - DNA, 18 bp, synthetic construct
  source 1..18: mol_type = other DNA
taagtgtcaaaaagaata

SEQ ID NO: 120 - DNA, 18 bp, synthetic construct
  source 1..18: mol_type = other DNA
taatttaagtgtcaaaaa

SEQ ID NO: 121 - DNA, 18 bp, synthetic construct
  source 1..18: mol_type = other DNA
tgttgtaatttaagtgtc

SEQ ID NO: 122 - DNA, 18 bp, synthetic construct
  source 1..18: mol_type = other DNA
aaaattgttgtaatttaa

SEQ ID NO: 123 - DNA, 18 bp, synthetic construct
  source 1..18: mol_type = other DNA
aggccaaaattgttgtaa

SEQ ID NO: 124 - DNA, 18 bp, synthetic construct
  source 1..18: mol_type = other DNA
tccacaggccaaaattgt

SEQ ID NO: 125 - DNA, 18 bp, synthetic construct
  source 1..18: mol_type = other DNA
tagagtccacaggccaaa

SEQ ID NO: 126 - DNA, 18 bp, synthetic construct
  source 1..18: mol_type = other DNA
aaaaatagagtccacagg

SEQ ID NO: 127 - DNA, 18 bp, synthetic construct
  source 1..18: mol_type = other DNA
aaaataaaaatagagtcc

SEQ ID NO: 128 - DNA, 18 bp, synthetic construct
  source 1..18: mol_type = other DNA
aacaaaaaataaaaatag

SEQ ID NO: 129 - DNA, 18 bp, synthetic construct
  source 1..18: mol_type = other DNA
ctaagaacaaaaaataaa

SEQ ID NO: 130 - DNA, 18 bp, synthetic construct
  source 1..18: mol_type = other DNA
cttacctaagaacaaaaa

SEQ ID NO: 131 - DNA, 18 bp, synthetic construct
  source 1..18: mol_type = other DNA
gggaacttacctaagaac

SEQ ID NO: 132 - DNA, 18 bp, synthetic construct
  source 1..18: mol_type = other DNA
acagcgggaacttaccta

SEQ ID NO: 133 - DNA, 18 bp, synthetic construct
  source 1..18: mol_type = other DNA
ttcacagcgggaacttac

SEQ ID NO: 134 - DNA, 18 bp, synthetic construct
  source 1..18: mol_type = other DNA
cttcacagcgggaactta

SEQ ID NO: 135 - DNA, 18 bp, synthetic construct
  source 1..18: mol_type = other DNA
tcctcttcacagcgggaa

SEQ ID NO: 136 - DNA, 18 bp, synthetic construct
  source 1..18: mol_type = other DNA
ggctttcctcttcacagc

SEQ ID NO: 137 - DNA, 18 bp, synthetic construct
  source 1..18: mol_type = other DNA
tagaaggctttcctcttc

SEQ ID NO: 138 - DNA, 18 bp, synthetic construct
  source 1..18: mol_type = other DNA
cgggctagaaggctttcc

SEQ ID NO: 139 - DNA, 18 bp, synthetic construct
  source 1..18: mol_type = other DNA
gacctcgggctagaaggc

SEQ ID NO: 140 - DNA, 18 bp, synthetic construct
  source 1..18: mol_type = other DNA
agatcgacctcgggctag

SEQ ID NO: 141 - DNA, 18 bp, synthetic construct
  source 1..18: mol_type = other DNA
gcactagatcgacctcgg

SEQ ID NO: 142 - DNA, 18 bp, synthetic construct
  source 1..18: mol_type = other DNA
tctgagcactagatcgac

SEQ ID NO: 143 - DNA, 18 bp, synthetic construct
  source 1..18: mol_type = other DNA
cttgttctgagcactaga

SEQ ID NO: 144 - DNA, 18 bp, synthetic construct
  source 1..18: mol_type = other DNA
acctgcttgttctgagca

SEQ ID NO: 145 - DNA, 18 bp, synthetic construct
  source 1..18: mol_type = other DNA
cgtccacctgcttgttct

SEQ ID NO: 146 - DNA, 18 bp, synthetic construct
  source 1..18: mol_type = other DNA
attctcgtccacctgctt

SEQ ID NO: 147 - DNA, 18 bp, synthetic construct
  source 1..18: mol_type = other DNA
aaagaattctcgtccacc

SEQ ID NO: 148 - DNA, 18 bp, synthetic construct
  source 1..18: mol_type = other DNA
aaatcaaagaattctcgt

SEQ ID NO: 149 - DNA, 18 bp, synthetic construct
  source 1..18: mol_type = other DNA
ggttgaaatcaaagaatt

SEQ ID NO: 150 - DNA, 18 bp, synthetic construct
  source 1..18: mol_type = other DNA
tctttggttgaaatcaaa

SEQ ID NO: 151 - DNA, 18 bp, synthetic construct
  source 1..18: mol_type = other DNA
gctcttctttggttgaaa

SEQ ID NO: 152 - DNA, 18 bp, synthetic construct
  source 1..18: mol_type = other DNA
tggaggctcttctttggt

SEQ ID NO: 153 - DNA, 18 bp, synthetic construct
  source 1..18: mol_type = other DNA
agaactggaggctcttct

SEQ ID NO: 154 - DNA, 18 bp, synthetic construct
  source 1..18: mol_type = other DNA
tttcaagaactggaggct

SEQ ID NO: 155 - DNA, 18 bp, synthetic construct
  source 1..18: mol_type = other DNA
ctccctttcaagaactgg

SEQ ID NO: 156 - DNA, 18 bp, synthetic construct
  source 1..18: mol_type = other DNA
ggagcctccctttcaaga

SEQ ID NO: 157 - DNA, 18 bp, synthetic construct
  source 1..18: mol_type = other DNA
aaaacggagcctcccttt

SEQ ID NO: 158 - DNA, 18 bp, synthetic construct
  source 1..18: mol_type = other DNA
ctccaaaaacggagcctc

SEQ ID NO: 159 - DNA, 18 bp, synthetic construct
  source 1..18: mol_type = other DNA
gggccctccaaaaacgga

SEQ ID NO: 160 - DNA, 18 bp, synthetic construct
  source 1..18: mol_type = other DNA
ccaaggggccctccaaaa

SEQ ID NO: 161 - DNA, 18 bp, synthetic construct
  source 1..18: mol_type = other DNA
tgactgagccaaggggcc

SEQ ID NO: 162 - DNA, 18 bp, synthetic construct
  source 1..18: mol_type = other DNA
agttctgactgagccaag

SEQ ID NO: 163 - DNA, 18 bp, synthetic construct
  source 1..18: mol_type = other DNA
ctccaagttctgactgag

SEQ ID NO: 164 - DNA, 18 bp, synthetic construct
  source 1..18: mol_type = other DNA
tccacctccaagttctga

SEQ ID NO: 165 - DNA, 18 bp, synthetic construct
  source 1..18: mol_type = other DNA
gcatgtccacctccaagt

SEQ ID NO: 166 - DNA, 18 bp, synthetic construct
  source 1..18: mol_type = other DNA
actcagcatgtccacctc

SEQ ID NO: 167 - DNA, 18 bp, synthetic construct
  source 1..18: mol_type = other DNA
cggcaactcagcatgtcc

SEQ ID NO: 168 - DNA, 18 bp, synthetic construct
  source 1..18: mol_type = other DNA
agctgcggcaactcagca

SEQ ID NO: 169 - DNA, 18 bp, synthetic construct
  source 1..18: mol_type = other DNA
aggtcagctgcggcaact

SEQ ID NO: 170 - DNA, 18 bp, synthetic construct
  source 1..18: mol_type = other DNA
agacaaggtcagctgcgg

SEQ ID NO: 171 - DNA, 18 bp, synthetic construct
  source 1..18: mol_type = other DNA
ggcacagacaaggtcagc

SEQ ID NO: 172 - DNA, 18 bp, synthetic construct
  source 1..18: mol_type = other DNA
ccacaggcacagacaagg

SEQ ID NO: 173 - DNA, 18 bp, synthetic construct
  source 1..18: mol_type = other DNA
cggagccacaggcacaga

SEQ ID NO: 174 - DNA, 18 bp, synthetic construct
  source 1..18: mol_type = other DNA
acttccggagccacaggc

SEQ ID NO: 175 - DNA, 18 bp, synthetic construct
  source 1..18: mol_type = other DNA
gagagacttccggagcca

SEQ ID NO: 176 - DNA, 18 bp, synthetic construct
  source 1..18: mol_type = other DNA
ccgtggagagacttccgg

SEQ ID NO: 177 - DNA, 18 bp, synthetic construct
  source 1..18: mol_type = other DNA
gcaggccgtggagagact

SEQ ID NO: 178 - DNA, 18 bp, synthetic construct
  source 1..18: mol_type = other DNA
caagggcaggccgtggag

SEQ ID NO: 179 - DNA, 18 bp, synthetic construct
  source 1..18: mol_type = other DNA
agactcaagggcaggccg

SEQ ID NO: 180 - DNA, 18 bp, synthetic construct
  source 1..18: mol_type = other DNA
tcctcagactcaagggca

SEQ ID NO: 181 - DNA, 18 bp, synthetic construct
  source 1..18: mol_type = other DNA
gcaattcctcagactcaa

SEQ ID NO: 182 - DNA, 18 bp, synthetic construct
  source 1..18: mol_type = other DNA
aactagcaattcctcaga

SEQ ID NO: 183 - DNA, 18 bp, synthetic construct
  source 1..18: mol_type = other DNA
gttttaactagcaattcc

SEQ ID NO: 184 - DNA, 18 bp, synthetic construct
  source 1..18: mol_type = other DNA
ggcgttttaactagcaat

SEQ ID NO: 185 - DNA, 18 bp, synthetic construct
  source 1..18: mol_type = other DNA
ctggcgttttaactagca

SEQ ID NO: 186 - DNA, 18 bp, synthetic construct
  source 1..18: mol_type = other DNA
tacctggcgttttaacta

SEQ ID NO: 187 - DNA, 18 bp, synthetic construct
  source 1..18: mol_type = other DNA
caccttacctggcgtttt

SEQ ID NO: 188 - DNA, 18 bp, synthetic construct
  source 1..18: mol_type = other DNA
aaccccaccttacctggc

SEQ ID NO: 189 - DNA, 18 bp, synthetic construct
  source 1..18: mol_type = other DNA
accccaaccccaccttac

SEQ ID NO: 190 - DNA, 18 bp, synthetic construct
  source 1..18: mol_type = other DNA
ctgagaccccaaccccac

SEQ ID NO: 191 - DNA, 18 bp, synthetic construct
  source 1..18: mol_type = other DNA
aaatactgagaccccaac

SEQ ID NO: 192 - DNA, 18 bp, synthetic construct
  source 1..18: mol_type = other DNA
tgctcaaatactgagacc

SEQ ID NO: 193 - DNA, 18 bp, synthetic construct
  source 1..18: mol_type = other DNA
atatctgctcaaatactg

SEQ ID NO: 194 - DNA, 18 bp, synthetic construct
  source 1..18: mol_type = other DNA
taatcatatctgctcaaa

SEQ ID NO: 195 - DNA, 18 bp, synthetic construct
  source 1..18: mol_type = other DNA
tcctctaatcatatctgc

SEQ ID NO: 196 - DNA, 18 bp, synthetic construct
  source 1..18: mol_type = other DNA
ctgcttcctctaatcata

SEQ ID NO: 197 - DNA, 18 bp, synthetic construct
  source 1..18: mol_type = other DNA
atctcctgcttcctctaa

SEQ ID NO: 198 - DNA, 18 bp, synthetic construct
  source 1..18: mol_type = other DNA
ctaaaatctcctgcttcc

SEQ ID NO: 199 - DNA, 18 bp, synthetic construct
  source 1..18: mol_type = other DNA
acatactaaaatctcctg

SEQ ID NO: 200 - DNA, 18 bp, synthetic construct
  source 1..18: mol_type = other DNA
tcaaaacatactaaaatc

SEQ ID NO: 201 - DNA, 18 bp, synthetic construct
  source 1..18: mol_type = other DNA
ttacatcaaaacatacta

SEQ ID NO: 202 - DNA, 18 bp, synthetic construct
  source 1..18: mol_type = other DNA
tggctttacatcaaaaca

SEQ ID NO: 203 - DNA, 18 bp, synthetic construct
  source 1..18: mol_type = other DNA
aatgttggctttacatca

SEQ ID NO: 204 - DNA, 18 bp, synthetic construct
  source 1..18: mol_type = other DNA
gatacaatgttggcttta

SEQ ID NO: 205 - DNA, 18 bp, synthetic construct
  source 1..18: mol_type = other DNA
atatagatacaatgttgg

SEQ ID NO: 206 - DNA, 18 bp, synthetic construct
  source 1..18: mol_type = other DNA
attgtatatagatacaat

SEQ ID NO: 207 - DNA, 18 bp, synthetic construct
  source 1..18: mol_type = other DNA
agtttattgtatatagat

SEQ ID NO: 208 - DNA, 18 bp, synthetic construct
  source 1..18: mol_type = other DNA
ggggtagtttattgtata

SEQ ID NO: 209 - DNA, 18 bp, synthetic construct
  source 1..18: mol_type = other DNA
ccaaccccaccttacctg

SEQ ID NO: 210 - DNA, 18 bp, synthetic construct
  source 1..18: mol_type = other DNA
ttcctctaatcatatctg

SEQ ID NO: 211 - DNA, 19 bp, synthetic construct
  source 1..19: mol_type = other DNA
ttcctctaatcatatctgc

SEQ ID NO: 212 - DNA, 20 bp, synthetic construct
  source 1..20: mol_type = other DNA
ttcctctaatcatatctgct

SEQ ID NO: 213 - DNA, 20 bp, synthetic construct
  source 1..20: mol_type = other DNA
gcttcctctaatcatatctg

SEQ ID NO: 214 - DNA, 18 bp, synthetic construct
  source 1..18: mol_type = other DNA
cctctaatcatatctgct

SEQ ID NO: 215 - DNA, 20 bp, synthetic construct
  source 1..20: mol_type = other DNA
tcctctaatcatatctgctc

SEQ ID NO: 216 - DNA, 19 bp, synthetic construct
  source 1..19: mol_type = other DNA
aacaaaggctacaaaaagt

SEQ ID NO: 217 - DNA, 20 bp, synthetic construct
  source 1..20: mol_type = other DNA
aattctgacaaaggctacaa

SEQ ID NO: 218 - DNA, 20 bp, synthetic construct
  source 1..20: mol_type = other DNA
aatgaaattctgacaaaggc

SEQ ID NO: 219 - DNA, 19 bp, synthetic construct
  source 1..19: mol_type = other DNA
aaggaatgaaattctgaca

SEQ ID NO: 220 - DNA, 20 bp, synthetic construct
  source 1..20: mol_type = other DNA
aattaaaaggaatgaaattc

SEQ ID NO: 221 - DNA, 19 bp, synthetic construct
  source 1..19: mol_type = other DNA
aacactttaaaaggaatga

SEQ ID NO: 222 - DNA, 18 bp, synthetic construct
  source 1..18: mol_type = other DNA
ataacacactttaaaagg

SEQ ID NO: 223 - DNA, 18 bp, synthetic construct
  source 1..18: mol_type = other DNA
aaagaataacacacttta

SEQ ID NO: 224 - DNA, 20 bp, synthetic construct
  source 1..20: mol_type = other DNA
aagtcaaaaagaataacaca

SEQ ID NO: 225 - DNA, 20 bp, synthetic construct
  source 1..20: mol_type = other DNA
aataagtgtcaaaaagaata

SEQ ID NO: 226 - DNA, 20 bp, synthetic construct
  source 1..20: mol_type = other DNA
aataatttaagtgtcaaaaa

SEQ ID NO: 227 - DNA, 20 bp, synthetic construct
  source 1..20: mol_type = other DNA
aatgttgtaatttaagtgtc

SEQ ID NO: 228 - DNA, 18 bp, synthetic construct
  source 1..18: mol_type = other DNA
aaaattgttgtaatttaa

SEQ ID NO: 229 - DNA, 19 bp, synthetic construct
  source 1..19: mol_type = other DNA
aaggccaaaattgttgtaa

SEQ ID NO: 230 - DNA, 20 bp, synthetic construct
  source 1..20: mol_type = other DNA
aatccacaggccaaaattgt

SEQ ID NO: 231 - DNA, 20 bp, synthetic construct
  source 1..20: mol_type = other DNA
aatagagtccacaggccaaa

SEQ ID NO: 232 - DNA, 18 bp, synthetic construct
  source 1..18: mol_type = other DNA
aaaaatagagtccacagg

SEQ ID NO: 233 - DNA, 18 bp, synthetic construct
  source 1..18: mol_type = other DNA
aaaataaaaatagagtcc

SEQ ID NO: 234 - DNA, 18 bp, synthetic construct
  source 1..18: mol_type = other DNA
aacaaaaaataaaaatag

SEQ ID NO: 235 - DNA, 20 bp, synthetic construct
  source 1..20: mol_type = other DNA
aactaagaacaaaaaataaa

SEQ ID NO: 236 - DNA, 20 bp, synthetic construct
  source 1..20: mol_type = other DNA
aacttacctaagaacaaaaa

SEQ ID NO: 237 - DNA, 20 bp, synthetic construct
  source 1..20: mol_type = other DNA
aagggaacttacctaagaac

SEQ ID NO: 238 - DNA, 19 bp, synthetic construct
  source 1..19: mol_type = other DNA
aacagcgggaacttaccta

SEQ ID NO: 239 - DNA, 20 bp, synthetic construct
  source 1..20: mol_type = other DNA
aattcacagcgggaacttac

SEQ ID NO: 240 - DNA, 20 bp, synthetic construct
  source 1..20: mol_type = other DNA
aacttcacagcgggaactta

SEQ ID NO: 241 - DNA, 20 bp, synthetic construct
  source 1..20: mol_type = other DNA
aatcctcttcacagcgggaa

SEQ ID NO: 242 - DNA, 20 bp, synthetic construct
  source 1..20: mol_type = other DNA
aaggctttcctcttcacagc

SEQ ID NO: 243 - DNA, 20 bp, synthetic construct
  source 1..20: mol_type = other DNA
aatagaaggctttcctcttc

SEQ ID NO: 244 - DNA, 20 bp, synthetic construct
  source 1..20: mol_type = other DNA
aacgggctagaaggctttcc

SEQ ID NO: 245 - DNA, 20 bp, synthetic construct
  source 1..20: mol_type = other DNA
aagacctcgggctagaaggc

SEQ ID NO: 246 - DNA, 19 bp, synthetic construct
  source 1..19: mol_type = other DNA
aagatcgacctcgggctag

SEQ ID NO: 247 - DNA, 20 bp, synthetic construct
  source 1..20: mol_type = other DNA
aagcactagatcgacctcgg

SEQ ID NO: 248 - DNA, 20 bp, synthetic construct
  source 1..20: mol_type = other DNA
aatctgagcactagatcgac

SEQ ID NO: 249 - DNA, 20 bp, synthetic construct
  source 1..20: mol_type = other DNA
aacttgttctgagcactaga

SEQ ID NO: 250 - DNA, 19 bp, synthetic construct
  source 1..19: mol_type = other DNA
aacctgcttgttctgagca

SEQ ID NO: 251 - DNA, 20 bp, synthetic construct
  source 1..20: mol_type = other DNA
aacgtccacctgcttgttct

SEQ ID NO: 252 - DNA, 19 bp, synthetic construct
  source 1..19: mol_type = other DNA
aattctcgtccacctgctt

SEQ ID NO: 253 - DNA, 18 bp, synthetic construct
  source 1..18: mol_type = other DNA
aaagaattctcgtccacc

SEQ ID NO: 254 - DNA, 18 bp, synthetic construct
  source 1..18: mol_type = other DNA
aaatcaaagaattctcgt

SEQ ID NO: 255 - DNA, 20 bp, synthetic construct
  source 1..20: mol_type = other DNA
aaggttgaaatcaaagaatt

SEQ ID NO: 256 - DNA, 20 bp, synthetic construct
  source 1..20: mol_type = other DNA
aatctttggttgaaatcaaa

SEQ ID NO: 257 - DNA, 20 bp, synthetic construct
  source 1..20: mol_type = other DNA
aagctcttctttggttgaaa

SEQ ID NO: 258 - DNA, 20 bp, synthetic construct
  source 1..20: mol_type = other DNA
aatggaggctcttctttggt

SEQ ID NO: 259 - DNA, 19 bp, synthetic construct
  source 1..19: mol_type = other DNA
aagaactggaggctcttct

SEQ ID NO: 260 - DNA, 20 bp, synthetic construct
  source 1..20: mol_type = other DNA
aatttcaagaactggaggct

SEQ ID NO: 261 - DNA, 20 bp, synthetic construct
  source 1..20: mol_type = other DNA
aactccctttcaagaactgg

SEQ ID NO: 262 - DNA, 20 bp, synthetic construct
  source 1..20: mol_type = other DNA
aaggagcctccctttcaaga

SEQ ID NO: 263 - DNA, 18 bp, synthetic construct
  source 1..18: mol_type = other DNA
aaaacggagcctcccttt

SEQ ID NO: 264 - DNA, 20 bp, synthetic construct
  source 1..20: mol_type = other DNA
aactccaaaaacggagcctc

SEQ ID NO: 265 - DNA, 20 bp, synthetic construct
  source 1..20: mol_type = other DNA
aagggccctccaaaaacgga

SEQ ID NO: 266 - DNA, 20 bp, synthetic construct
  source 1..20: mol_type = other DNA
aaccaaggggccctccaaaa

SEQ ID NO: 267 - DNA, 20 bp, synthetic construct
  source 1..20: mol_type = other DNA
aatgactgagccaaggggcc

SEQ ID NO: 268 - DNA, 19 bp, synthetic construct
  source 1..19: mol_type = other DNA
aagttctgactgagccaag

SEQ ID NO: 269 - DNA, 20 bp, synthetic construct
  source 1..20: mol_type = other DNA
aactccaagttctgactgag

SEQ ID NO: 270 - DNA, 20 bp, synthetic construct
  source 1..20: mol_type = other DNA
aatccacctccaagttctga

SEQ ID NO: 271 - DNA, 20 bp, synthetic construct
  source 1..20: mol_type = other DNA
aagcatgtccacctccaagt

SEQ ID NO: 272 - DNA, 19 bp, synthetic construct
  source 1..19: mol_type = other DNA
aactcagcatgtccacctc

SEQ ID NO: 273 - DNA, 20 bp, synthetic construct
  source 1..20: mol_type = other DNA
aacggcaactcagcatgtcc

SEQ ID NO: 274 - DNA, 19 bp, synthetic construct
  source 1..19: mol_type = other DNA
aagctgcggcaactcagca

SEQ ID NO: 275 - DNA, 19 bp, synthetic construct
  source 1..19: mol_type = other DNA
aaggtcagctgcggcaact

SEQ ID NO: 276 - DNA, 19 bp, synthetic construct
  source 1..19: mol_type = other DNA
aagacaaggtcagctgcgg

SEQ ID NO: 277 - DNA, 20 bp, synthetic construct
  source 1..20: mol_type = other DNA
aaggcacagacaaggtcagc

SEQ ID NO: 278 - DNA, 20 bp, synthetic construct
  source 1..20: mol_type = other DNA
aaccacaggcacagacaagg

SEQ ID NO: 279 - DNA, 20 bp, synthetic construct
  source 1..20: mol_type = other DNA
aacggagccacaggcacaga

SEQ ID NO: 280 - DNA, 19 bp, synthetic construct
  source 1..19: mol_type = other DNA
aacttccggagccacaggc

SEQ ID NO: 281 - DNA, 20 bp, synthetic construct
  source 1..20: mol_type = other DNA
aagagagacttccggagcca

SEQ ID NO: 282 - DNA, 20 bp, synthetic construct
  source 1..20: mol_type = other DNA
aaccgtggagagacttccgg

SEQ ID NO: 283 - DNA, 20 bp, synthetic construct
  source 1..20: mol_type = other DNA
aagcaggccgtggagagact

SEQ ID NO: 284 - DNA, 20 bp, synthetic construct
  source 1..20: mol_type = other DNA
aacaagggcaggccgtggag

SEQ ID NO: 285 - DNA, 19 bp, synthetic construct
  source 1..19: mol_type = other DNA
aagactcaagggcaggccg

SEQ ID NO: 286 - DNA, 20 bp, synthetic construct
  source 1..20: mol_type = other DNA
aatcctcagactcaagggca

SEQ ID NO: 287 - DNA, 20 bp, synthetic construct
  source 1..20: mol_type = other DNA
aagcaattcctcagactcaa

SEQ ID NO: 288 - DNA, 18 bp, synthetic construct
  source 1..18: mol_type = other DNA
aactagcaattcctcaga

SEQ ID NO: 289 - DNA, 20 bp, synthetic construct
  source 1..20: mol_type = other DNA
aagttttaactagcaattcc

SEQ ID NO: 290 - DNA, 20 bp, synthetic construct
  source 1..20: mol_type = other DNA
aaggcgttttaactagcaat

SEQ ID NO: 291 - DNA, 20 bp, synthetic construct
  source 1..20: mol_type = other DNA
aactggcgttttaactagca

SEQ ID NO: 292 - DNA, 20 bp, synthetic construct
  source 1..20: mol_type = other DNA
aatacctggcgttttaacta

SEQ ID NO: 293 - DNA, 20 bp, synthetic construct
  source 1..20: mol_type = other DNA
aacaccttacctggcgtttt

SEQ ID NO: 294 - DNA, 18 bp, synthetic construct
  source 1..18: mol_type = other DNA
aaccccaccttacctggc

SEQ ID NO: 295 - DNA, 19 bp, synthetic construct
  source 1..19: mol_type = other DNA
aaccccaaccccaccttac

SEQ ID NO: 296 - DNA, 20 bp, synthetic construct
  source 1..20: mol_type = other DNA
aactgagaccccaaccccac

SEQ ID NO: 297 - DNA, 18 bp, synthetic construct
  source 1..18: mol_type = other DNA
aaatactgagaccccaac

SEQ ID NO: 298 - DNA, 20 bp, synthetic construct
  source 1..20: mol_type = other DNA
aatgctcaaatactgagacc

SEQ ID NO: 299 - DNA, 19 bp, synthetic construct
  source 1..19: mol_type = other DNA
aatatctgctcaaatactg

SEQ ID NO: 300 - DNA, 20 bp, synthetic construct
  source 1..20: mol_type = other DNA
aataatcatatctgctcaaa

SEQ ID NO: 301 - DNA, 20 bp, synthetic construct
  source 1..20: mol_type = other DNA
aatcctctaatcatatctgc

SEQ ID NO: 302 - DNA, 20 bp, synthetic construct
  source 1..20: mol_type = other DNA
aactgcttcctctaatcata

SEQ ID NO: 303 - DNA, 19 bp, synthetic construct
  source 1..19: mol_type = other DNA
aatctcctgcttcctctaa

SEQ ID NO: 304 - DNA, 20 bp, synthetic construct
  source 1..20: mol_type = other DNA
aactaaaatctcctgcttcc

SEQ ID NO: 305 - DNA, 19 bp, synthetic construct
  source 1..19: mol_type = other DNA
aacatactaaaatctcctg

SEQ ID NO: 306 - DNA, 20 bp, synthetic construct
  source 1..20: mol_type = other DNA
aatcaaaacatactaaaatc

SEQ ID NO: 307 - DNA, 20 bp, synthetic construct
  source 1..20: mol_type = other DNA
aattacatcaaaacatacta

SEQ ID NO: 308 - DNA, 20 bp, synthetic construct
  source 1..20: mol_type = other DNA
aatggctttacatcaaaaca

SEQ ID NO: 309 - DNA, 18 bp, synthetic construct
  source 1..18: mol_type = other DNA
aatgttggctttacatca

SEQ ID NO: 310 - DNA, 20 bp, synthetic construct
  source 1..20: mol_type = other DNA
aagatacaatgttggcttta

SEQ ID NO: 311 - DNA, 19 bp, synthetic construct
  source 1..19: mol_type = other DNA
aatatagatacaatgttgg

SEQ ID NO: 312 - DNA, 19 bp, synthetic construct
  source 1..19: mol_type = other DNA
aattgtatatagatacaat

SEQ ID NO: 313 - DNA, 19 bp, synthetic construct
  source 1..19: mol_type = other DNA
aagtttattgtatatagat

SEQ ID NO: 314 - DNA, 20 bp, synthetic construct
  source 1..20: mol_type = other DNA
aaggggtagtttattgtata

SEQ ID NO: 315 - DNA, 20 bp, synthetic construct
  source 1..20: mol_type = other DNA
aaccaaccccaccttacctg

SEQ ID NO: 316 - DNA, 20 bp, synthetic construct
  source 1..20: mol_type = other DNA
aattcctctaatcatatctg

SEQ ID NO: 317 - DNA, 21 bp, synthetic construct
  source 1..21: mol_type = other DNA
aattcctctaatcatatctgc

SEQ ID NO: 318 - DNA, 22 bp, synthetic construct
  source 1..22: mol_type = other DNA
aattcctctaatcatatctgct

SEQ ID NO: 319 - DNA, 22 bp, synthetic construct
  source 1..22: mol_type = other DNA
aagcttcctctaatcatatctg

SEQ ID NO: 320 - DNA, 20 bp, synthetic construct
  source 1..20: mol_type = other DNA
aacctctaatcatatctgct

SEQ ID NO: 321 - DNA, 22 bp, synthetic construct
  source 1..22: mol_type = other DNA
aatcctctaatcatatctgctc

SEQ ID NO: 322 - DNA, 18 bp, synthetic construct
  source 1..18: mol_type = other DNA
aggctacaaaaagtggat

SEQ ID NO: 323 - DNA, 18 bp, synthetic construct
  source 1..18: mol_type = other DNA
gacaaaggctacaaaaag

SEQ ID NO: 324 - DNA, 18 bp, synthetic construct
  source 1..18: mol_type = other DNA
attctgacaaaggctaca

SEQ ID NO: 325 - DNA, 18 bp, synthetic construct
  source 1..18: mol_type = other DNA
atgaaattctgacaaagg

SEQ ID NO: 326 - DNA, 18 bp, synthetic construct
  source 1..18: mol_type = other DNA
aaggaatgaaattctgac

SEQ ID NO: 327 - DNA, 18 bp, synthetic construct
  source 1..18: mol_type = other DNA
tttaaaaggaatgaaatt

SEQ ID NO: 328 - DNA, 18 bp, synthetic construct
  source 1..18: mol_type = other DNA
cacactttaaaaggaatg

SEQ ID NO: 329 - DNA, 18 bp, synthetic construct
  source 1..18: mol_type = other DNA
aataacacactttaaaag

SEQ ID NO: 330 - DNA, 18 bp, synthetic construct
  source 1..18: mol_type = other DNA
aaaagaataacacacttt

SEQ ID NO: 331 - DNA, 18 bp, synthetic construct
  source 1..18: mol_type = other DNA
tgtcaaaaagaataacac

SEQ ID NO: 332 - DNA, 18 bp, synthetic construct
  source 1..18: mol_type = other DNA
ttaagtgtcaaaaagaat

SEQ ID NO: 333 - DNA, 18 bp, synthetic construct
  source 1..18: mol_type = other DNA
gtaatttaagtgtcaaaa

SEQ ID NO: 334 - DNA, 18 bp, synthetic construct
  source 1..18: mol_type = other DNA
ttgttgtaatttaagtgt

SEQ ID NO: 335 - DNA, 18 bp, synthetic construct
  source 1..18: mol_type = other DNA
caaaattgttgtaattta

SEQ ID NO: 336 - DNA, 18 bp, synthetic construct
  source 1..18: mol_type = other DNA
caggccaaaattgttgta

SEQ ID NO: 337 - DNA, 18 bp, synthetic construct
  source 1..18: mol_type = other DNA
gtccacaggccaaaattg

SEQ ID NO: 338 - DNA, 18 bp, synthetic construct
  source 1..18: mol_type = other DNA
atagagtccacaggccaa

SEQ ID NO: 339 - DNA, 18 bp, synthetic construct
  source 1..18: mol_type = other DNA
cttcacagcgggaactta

SEQ ID NO: 340 - DNA, 18 bp, synthetic construct
  source 1..18: mol_type = other DNA
tcctcttcacagcgggaa

SEQ ID NO: 341 - DNA, 18 bp, synthetic construct
  source 1..18: mol_type = other DNA
ggctttcctcttcacagc

SEQ ID NO: 342 - DNA, 18 bp, synthetic construct
  source 1..18: mol_type = other DNA
tagaaggctttcctcttc

SEQ ID NO: 343 - DNA, 18 bp, synthetic construct
  source 1..18: mol_type = other DNA
cgggctagaaggctttcc

SEQ ID NO: 344 - DNA, 18 bp, synthetic construct
  source 1..18: mol_type = other DNA
gacctcgggctagaaggc

SEQ ID NO: 345 - DNA, 18 bp, synthetic construct
  source 1..18: mol_type = other DNA
agatcgacctcgggctag

SEQ ID NO: 346 - DNA, 18 bp, synthetic construct
  source 1..18: mol_type = other DNA
gcactagatcgacctcgg

SEQ ID NO: 347 - DNA, 18 bp, synthetic construct
  source 1..18: mol_type = other DNA
tctgagcactagatcgac

SEQ ID NO: 348 - DNA, 18 bp, synthetic construct
  source 1..18: mol_type = other DNA
cttgttctgagcactaga

SEQ ID NO: 349 - DNA, 18 bp, synthetic construct
  source 1..18: mol_type = other DNA
acctgcttgttctgagca

SEQ ID NO: 350 - DNA, 18 bp, synthetic construct
  source 1..18: mol_type = other DNA
cgtccacctgcttgttct

SEQ ID NO: 351 - DNA, 18 bp, synthetic construct
  source 1..18: mol_type = other DNA
attctcgtccacctgctt

SEQ ID NO: 352 - DNA, 18 bp, synthetic construct
  source 1..18: mol_type = other DNA
aaagaattctcgtccacc

SEQ ID NO: 353 - DNA, 18 bp, synthetic construct
  source 1..18: mol_type = other DNA
aaatcaaagaattctcgt

SEQ ID NO: 354 - DNA, 18 bp, synthetic construct
  source 1..18: mol_type = other DNA
ggttgaaatcaaagaatt

SEQ ID NO: 355 - DNA, 18 bp, synthetic construct
  source 1..18: mol_type = other DNA
tctttggttgaaatcaaa

SEQ ID NO: 356 - DNA, 18 bp, synthetic construct
  source 1..18: mol_type = other DNA
gctcttctttggttgaaa

SEQ ID NO: 357 - DNA, 18 bp, synthetic construct
  source 1..18: mol_type = other DNA
tggaggctcttctttggt

SEQ ID NO: 358 - DNA, 18 bp, synthetic construct
  source 1..18: mol_type = other DNA
agaactggaggctcttct

SEQ ID NO: 359 - DNA, 18 bp, synthetic construct
  source 1..18: mol_type = other DNA
tttcaagaactggaggct

SEQ ID NO: 360 - DNA, 18 bp, synthetic construct
  source 1..18: mol_type = other DNA
ctccctttcaagaactgg

SEQ ID NO: 361 - DNA, 18 bp, synthetic construct
  source 1..18: mol_type = other DNA
ggagcctccctttcaaga

SEQ ID NO: 362 - DNA, 18 bp, synthetic construct
  source 1..18: mol_type = other DNA
aaaacggagcctcccttt

SEQ ID NO: 363 - DNA, 18 bp, synthetic construct
  source 1..18: mol_type = other DNA
ctccaaaaacggagcctc

SEQ ID NO: 364 - DNA, 18 bp, synthetic construct
  source 1..18: mol_type = other DNA
gggccctccaaaaacgga

SEQ ID NO: 365 - DNA, 18 bp, synthetic construct
  source 1..18: mol_type = other DNA
ccaaggggccctccaaaa

SEQ ID NO: 366 - DNA, 18 bp, synthetic construct
  source 1..18: mol_type = other DNA
ctgagccaaggggccctc

SEQ ID NO: 367 - DNA, 18 bp, synthetic construct
  source 1..18: mol_type = other DNA
tctgactgagccaagggg

SEQ ID NO: 368 - DNA, 18 bp, synthetic construct
  source 1..18: mol_type = other DNA
caagttctgactgagcca

SEQ ID NO: 369 - DNA, 18 bp, synthetic construct
  source 1..18: mol_type = other DNA
acctccaagttctgactg

SEQ ID NO: 370 - DNA, 18 bp, synthetic construct
  source 1..18: mol_type = other DNA
tgtccacctccaagttct

SEQ ID NO: 371 - DNA, 18 bp, synthetic construct
  source 1..18: mol_type = other DNA
cagcatgtccacctccaa

SEQ ID NO: 372 - DNA, 18 bp, synthetic construct
  source 1..18: mol_type = other DNA
caactcagcatgtccacc

SEQ ID NO: 373 - DNA, 18 bp, synthetic construct
  source 1..18: mol_type = other DNA
tgcggcaactcagcatgt

SEQ ID NO: 374 - DNA, 18 bp, synthetic construct
  source 1..18: mol_type = other DNA
tcagctgcggcaactcag

SEQ ID NO: 375 - DNA, 18 bp, synthetic construct
  source 1..18: mol_type = other DNA
caaggtcagctgcggcaa

SEQ ID NO: 376 - DNA, 18 bp, synthetic construct
  source 1..18: mol_type = other DNA
acagacaaggtcagctgc

SEQ ID NO: 377 - DNA, 18 bp, synthetic construct
  source 1..18: mol_type = other DNA
caggcacagacaaggtca

SEQ ID NO: 378 - DNA, 18 bp, synthetic construct
  source 1..18: mol_type = other DNA
agccacaggcacagacaa

SEQ ID NO: 379 - DNA, 18 bp, synthetic construct
  source 1..18: mol_type = other DNA
tccggagccacaggcaca

SEQ ID NO: 380 - DNA, 18 bp, synthetic construct
  source 1..18: mol_type = other DNA
agacttccggagccacag

SEQ ID NO: 381 - DNA, 18 bp, synthetic construct
  source 1..18: mol_type = other DNA
tggagagacttccggagc

SEQ ID NO: 382 - DNA, 18 bp, synthetic construct
  source 1..18: mol_type = other DNA
ggccgtggagagacttcc

SEQ ID NO: 383 - DNA, 18 bp, synthetic construct
  source 1..18: mol_type = other DNA
gggcaggccgtggagaga

SEQ ID NO: 384 - DNA, 18 bp, synthetic construct
  source 1..18: mol_type = other DNA
ctcaagggcaggccgtgg

SEQ ID NO: 385 - DNA, 18 bp, synthetic construct
  source 1..18: mol_type = other DNA
tcagactcaagggcaggc

SEQ ID NO: 386 - DNA, 18 bp, synthetic construct
  source 1..18: mol_type = other DNA
attcctcagactcaaggg

SEQ ID NO: 387 - DNA, 18 bp, synthetic construct
  source 1..18: mol_type = other DNA
tagcaattcctcagactc

SEQ ID NO: 388 - DNA, 18 bp, synthetic construct
  source 1..18: mol_type = other DNA
taactagcaattcctcag

SEQ ID NO: 389 - DNA, 18 bp, synthetic construct
  source 1..18: mol_type = other DNA
ttaactagcaattcctca

SEQ ID NO: 390 - DNA, 18 bp, synthetic construct
  source 1..18: mol_type = other DNA
tactgagaccccaacccc

SEQ ID NO: 391 - DNA, 18 bp, synthetic construct
  source 1..18: mol_type = other DNA
tcaaatactgagacccca

SEQ ID NO: 392 - DNA, 18 bp, synthetic construct
  source 1..18: mol_type = other DNA
tctgctcaaatactgaga

SEQ ID NO: 393 - DNA, 18 bp, synthetic construct
  source 1..18: mol_type = other DNA
tcatatctgctcaaatac

SEQ ID NO: 394 - DNA, 18 bp, synthetic construct
  source 1..18: mol_type = other DNA
tctaatcatatctgctca

SEQ ID NO: 395 - DNA, 18 bp, synthetic construct
  source 1..18: mol_type = other DNA
cttcctctaatcatatct

SEQ ID NO: 396 - DNA, 18 bp, synthetic construct
  source 1..18: mol_type = other DNA
tcctgcttcctctaatca

SEQ ID NO: 397 - DNA, 18 bp, synthetic construct
  source 1..18: mol_type = other DNA
aaatctcctgcttcctct

SEQ ID NO: 398 - DNA, 18 bp, synthetic construct
  source 1..18: mol_type = other DNA
tactaaaatctcctgctt

SEQ ID NO: 399 - DNA, 18 bp, synthetic construct
  source 1..18: mol_type = other DNA
aaacatactaaaatctcc

SEQ ID NO: 400 - DNA, 18 bp, synthetic construct
  source 1..18: mol_type = other DNA
catcaaaacatactaaaa

SEQ ID NO: 401 - DNA, 18 bp, synthetic construct
  source 1..18: mol_type = other DNA
ctttacatcaaaacatac

SEQ ID NO: 402 - DNA, 18 bp, synthetic construct
  source 1..18: mol_type = other DNA
gttggctttacatcaaaa

SEQ ID NO: 403 - DNA, 18 bp, synthetic construct
  source 1..18: mol_type = other DNA
acaatgttggctttacat

SEQ ID NO: 404 - DNA, 18 bp, synthetic construct
  source 1..18: mol_type = other DNA
tagatacaatgttggctt

SEQ ID NO: 405 - DNA, 18 bp, synthetic construct
  source 1..18: mol_type = other DNA
gtatatagatacaatgtt

SEQ ID NO: 406 - DNA, 18 bp, synthetic construct
  source 1..18: mol_type = other DNA
ttattgtatatagataca

SEQ ID NO: 407 - DNA, 18 bp, synthetic construct
  source 1..18: mol_type = other DNA
gtagtttattgtatatag

SEQ ID NO: 408 - DNA, 18 bp, synthetic construct
  source 1..18: mol_type = other DNA
agggggtagtttattgta

SEQ ID NO: 409 - DNA, 19 bp, synthetic construct
  source 1..19: mol_type = other DNA
aaggctacaaaaagtggat

SEQ ID NO: 410 - DNA, 20 bp, synthetic construct
  source 1..20: mol_type = other DNA
aagacaaaggctacaaaaag

SEQ ID NO: 411 - DNA, 19 bp, synthetic construct
  source 1..19: mol_type = other DNA
aattctgacaaaggctaca

SEQ ID NO: 412 - DNA, 19 bp, synthetic construct
  source 1..19: mol_type = other DNA
aatgaaattctgacaaagg

SEQ ID NO: 413 - DNA, 18 bp, synthetic construct
  source 1..18: mol_type = other DNA
aaggaatgaaattctgac

SEQ ID NO: 414 - DNA, 20 bp, synthetic construct
  source 1..20: mol_type = other DNA
aatttaaaaggaatgaaatt

SEQ ID NO: 415 - DNA, 20 bp, synthetic construct
  source 1..20: mol_type = other DNA
aacacactttaaaaggaatg

SEQ ID NO: 416 - DNA, 18 bp, synthetic construct
  source 1..18: mol_type = other DNA
aataacacactttaaaag

SEQ ID NO: 417 - DNA, 18 bp, synthetic construct
  source 1..18: mol_type = other DNA
aaaagaataacacacttt

SEQ ID NO: 418 - DNA, 20 bp, synthetic construct
  source 1..20: mol_type = other DNA
aatgtcaaaaagaataacac

SEQ ID NO: 419 - DNA, 20 bp, synthetic construct
  source 1..20: mol_type = other DNA
aattaagtgtcaaaaagaat

SEQ ID NO: 420 - DNA, 20 bp, synthetic construct
  source 1..20: mol_type = other DNA
aagtaatttaagtgtcaaaa

SEQ ID NO: 421 - DNA, 20 bp, synthetic construct
  source 1..20: mol_type = other DNA
aattgttgtaatttaagtgt

SEQ ID NO: 422 - DNA, 20 bp, synthetic construct
  source 1..20: mol_type = other DNA
aacaaaattgttgtaattta

SEQ ID NO: 423 - DNA, 20 bp, synthetic construct
  source 1..20: mol_type = other DNA
aacaggccaaaattgttgta

SEQ ID NO: 424 - DNA, 20 bp, synthetic construct
  source 1..20: mol_type = other DNA
aagtccacaggccaaaattg

SEQ ID NO: 425 - DNA, 19 bp, synthetic construct
  source 1..19: mol_type = other DNA
aatagagtccacaggccaa

SEQ ID NO: 426 - DNA, 20 bp, synthetic construct
  source 1..20: mol_type = other DNA
aacttcacagcgggaactta

SEQ ID NO: 427 - DNA, 20 bp, synthetic construct
  source 1..20: mol_type = other DNA
aatcctcttcacagcgggaa

SEQ ID NO: 428 - DNA, 20 bp, synthetic construct
  source 1..20: mol_type = other DNA
aaggctttcctcttcacagc

SEQ ID NO: 429 - DNA, 20 bp, synthetic construct
  source 1..20: mol_type = other DNA
aatagaaggctttcctcttc

SEQ ID NO: 430 - DNA, 20 bp, synthetic construct
  source 1..20: mol_type = other DNA
aacgggctagaaggctttcc

SEQ ID NO: 431 - DNA, 20 bp, synthetic construct
  source 1..20: mol_type = other DNA
aagacctcgggctagaaggc

SEQ ID NO: 432 - DNA, 19 bp, synthetic construct
  source 1..19: mol_type = other DNA
aagatcgacctcgggctag

SEQ ID NO: 433 - DNA, 20 bp, synthetic construct
  source 1..20: mol_type = other DNA
aagcactagatcgacctcgg

SEQ ID NO: 434 - DNA, 20 bp, synthetic construct
  source 1..20: mol_type = other DNA
aatctgagcactagatcgac

SEQ ID NO: 435 - DNA, 20 bp, synthetic construct
  source 1..20: mol_type = other DNA
aacttgttctgagcactaga

SEQ ID NO: 436 - DNA, 19 bp, synthetic construct
  source 1..19: mol_type = other DNA
aacctgcttgttctgagca

SEQ ID NO: 437 - DNA, 20 bp, synthetic construct
  source 1..20: mol_type = other DNA
aacgtccacctgcttgttct

SEQ ID NO: 438 - DNA, 19 bp, synthetic construct
  source 1..19: mol_type = other DNA
aattctcgtccacctgctt

SEQ ID NO: 439 - DNA, 18 bp, synthetic construct
  source 1..18: mol_type = other DNA
aaagaattctcgtccacc

SEQ ID NO: 440 - DNA, 18 bp, synthetic construct
  source 1..18: mol_type = other DNA
aaatcaaagaattctcgt

SEQ ID NO: 441 - DNA, 20 bp, synthetic construct
  source 1..20: mol_type = other DNA
aaggttgaaatcaaagaatt

SEQ ID NO: 442 - DNA, 20 bp, synthetic construct
  source 1..20: mol_type = other DNA
aatctttggttgaaatcaaa

SEQ ID NO: 443 - DNA, 20 bp, synthetic construct
  source 1..20: mol_type = other DNA
aagctcttctttggttgaaa

SEQ ID NO: 444 - DNA, 20 bp, synthetic construct
  source 1..20: mol_type = other DNA
aatggaggctcttctttggt

SEQ ID NO: 445 - DNA, 19 bp, synthetic construct
  source 1..19: mol_type = other DNA
aagaactggaggctcttct

SEQ ID NO: 446 - DNA, 20 bp, synthetic construct
  source 1..20: mol_type = other DNA
aatttcaagaactggaggct

SEQ ID NO: 447 - DNA, 20 bp, synthetic construct
  source 1..20: mol_type = other DNA
aactccctttcaagaactgg

SEQ ID NO: 448 - DNA, 20 bp, synthetic construct
  source 1..20: mol_type = other DNA
aaggagcctccctttcaaga

SEQ ID NO: 449 - DNA, 18 bp, synthetic construct
  source 1..18: mol_type = other DNA
aaaacggagcctcccttt

SEQ ID NO: 450 - DNA, 20 bp, synthetic construct
  source 1..20: mol_type = other DNA
aactccaaaaacggagcctc

SEQ ID NO: 451 - DNA, 20 bp, synthetic construct
  source 1..20: mol_type = other DNA
aagggccctccaaaaacgga

SEQ ID NO: 452 - DNA, 20 bp, synthetic construct
  source 1..20: mol_type = other DNA
aaccaaggggccctccaaaa

SEQ ID NO: 453 - DNA, 20 bp, synthetic construct
  source 1..20: mol_type = other DNA
aactgagccaaggggccctc

SEQ ID NO: 454 - DNA, 20 bp, synthetic construct
  source 1..20: mol_type = other DNA
aatctgactgagccaagggg

SEQ ID NO: 455 - DNA, 20 bp, synthetic construct
  source 1..20: mol_type = other DNA
aacaagttctgactgagcca

SEQ ID NO: 456 - DNA, 19 bp, synthetic construct
  source 1..19: mol_type = other DNA
aacctccaagttctgactg

SEQ ID NO: 457 - DNA, 20 bp, synthetic construct
  source 1..20: mol_type = other DNA
aatgtccacctccaagttct

SEQ ID NO: 458 - DNA, 20 bp, synthetic construct
  source 1..20: mol_type = other DNA
aacagcatgtccacctccaa

SEQ ID NO: 459 - DNA, 20 bp, synthetic construct
  source 1..20: mol_type = other DNA
aacaactcagcatgtccacc

SEQ ID NO: 460 - DNA, 20 bp, synthetic construct
  source 1..20: mol_type = other DNA
aatgcggcaactcagcatgt

SEQ ID NO: 461 - DNA, 20 bp, synthetic construct
  source 1..20: mol_type = other DNA
aatcagctgcggcaactcag

SEQ ID NO: 462 - DNA, 20 bp, synthetic construct
  source 1..20: mol_type = other DNA
aacaaggtcagctgcggcaa

SEQ ID NO: 463 - DNA, 19 bp, synthetic construct
  source 1..19: mol_type = other DNA
aacagacaaggtcagctgc

SEQ ID NO: 464 - DNA, 20 bp, synthetic construct
  source 1..20: mol_type = other DNA
aacaggcacagacaaggtca

SEQ ID NO: 465 - DNA, 19 bp, synthetic construct
  source 1..19: mol_type = other DNA
aagccacaggcacagacaa

SEQ ID NO: 466 - DNA, 20 bp, synthetic construct
  source 1..20: mol_type = other DNA
aatccggagccacaggcaca

SEQ ID NO: 467 - DNA, 19 bp, synthetic construct
  source 1..19: mol_type = other DNA
aagacttccggagccacag

SEQ ID NO: 468 - DNA, 20 bp, synthetic construct
  source 1..20: mol_type = other DNA
aatggagagacttccggagc

SEQ ID NO: 469 - DNA, 20 bp, synthetic construct
  source 1..20: mol_type = other DNA
aaggccgtggagagacttcc

SEQ ID NO: 470 - DNA, 20 bp, synthetic construct
  source 1..20: mol_type = other DNA
aagggcaggccgtggagaga

SEQ ID NO: 471 - DNA, 20 bp, synthetic construct
  source 1..20: mol_type = other DNA
aactcaagggcaggccgtgg

SEQ ID NO: 472 - DNA, 20 bp, synthetic construct
  source 1..20: mol_type = other DNA
aatcagactcaagggcaggc

SEQ ID NO: 473 - DNA, 19 bp, synthetic construct
  source 1..19: mol_type = other DNA
aattcctcagactcaaggg

SEQ ID NO: 474 - DNA, 20 bp, synthetic construct
  source 1..20: mol_type = other DNA
aatagcaattcctcagactc

SEQ ID NO: 475 - DNA, 20 bp, synthetic construct
  source 1..20: mol_type = other DNA
aataactagcaattcctcag

SEQ ID NO: 476 - DNA, 20 bp, synthetic construct
  source 1..20: mol_type = other DNA
aattaactagcaattcctca

SEQ ID NO: 477 - DNA, 20 bp, synthetic construct
  source 1..20: mol_type = other DNA
aatactgagaccccaacccc

SEQ ID NO: 478 - DNA, 20 bp, synthetic construct
  source 1..20: mol_type = other DNA
aatcaaatactgagacccca

SEQ ID NO: 479 - DNA, 20 bp, synthetic construct
  source 1..20: mol_type = other DNA
aatctgctcaaatactgaga

SEQ ID NO: 480 - DNA, 20 bp, synthetic construct
  source 1..20: mol_type = other DNA
aatcatatctgctcaaatac

SEQ ID NO: 481 - DNA, 20 bp, synthetic construct
  source 1..20: mol_type = other DNA
aatctaatcatatctgctca

SEQ ID NO: 482 - DNA, 20 bp, synthetic construct
  source 1..20: mol_type = other DNA
aacttcctctaatcatatct

SEQ ID NO: 483 - DNA, 20 bp, synthetic construct
  source 1..20: mol_type = other DNA
aatcctgcttcctctaatca

SEQ ID NO: 484 - DNA, 18 bp, synthetic construct
  source 1..18: mol_type = other DNA
aaatctcctgcttcctct

SEQ ID NO: 485 - DNA, 20 bp, synthetic construct
  source 1..20: mol_type = other DNA
aatactaaaatctcctgctt

SEQ ID NO: 486 - DNA, 18 bp, synthetic construct
  source 1..18: mol_type = other DNA
aaacatactaaaatctcc

SEQ ID NO: 487 - DNA, 20 bp, synthetic construct
  source 1..20: mol_type = other DNA
aacatcaaaacatactaaaa

SEQ ID NO: 488 - DNA, 20 bp, synthetic construct
  source 1..20: mol_type = other DNA
aactttacatcaaaacatac

SEQ ID NO: 489 - DNA, 20 bp, synthetic construct
  source 1..20: mol_type = other DNA
aagttggctttacatcaaaa

SEQ ID NO: 490 - DNA, 19 bp, synthetic construct
  source 1..19: mol_type = other DNA
aacaatgttggctttacat

SEQ ID NO: 491 - DNA, 20 bp, synthetic construct
  source 1..20: mol_type = other DNA
aatagatacaatgttggctt

SEQ ID NO: 492 - DNA, 20 bp, synthetic construct
  source 1..20: mol_type = other DNA
aagtatatagatacaatgtt

SEQ ID NO: 493 - DNA, 20 bp, synthetic construct
  source 1..20: mol_type = other DNA
aattattgtatatagataca

SEQ ID NO: 494 - DNA, 20 bp, synthetic construct
  source 1..20: mol_type = other DNA
aagtagtttattgtatatag

SEQ ID NO: 495 - DNA, 19 bp, synthetic construct
  source 1..19: mol_type = other DNA
aagggggtagtttattgta

SEQ ID NO: 496 - DNA, 18 bp, synthetic construct
  source 1..18: mol_type = other DNA
ggctacaaaaagtggatg

SEQ ID NO: 497 - DNA, 18 bp, synthetic construct
  source 1..18: mol_type = other DNA
aggctacaaaaagtggat

SEQ ID NO: 498 - DNA, 18 bp, synthetic construct
  source 1..18: mol_type = other DNA
aaggctacaaaaagtgga

SEQ ID NO: 499 - DNA, 18 bp, synthetic construct
  source 1..18: mol_type = other DNA
aaaggctacaaaaagtgg

SEQ ID NO: 500 - DNA, 18 bp, synthetic construct
  source 1..18: mol_type = other DNA
caaaggctacaaaaagtg

SEQ ID NO: 501 - DNA, 18 bp, synthetic construct
  source 1..18: mol_type = other DNA
acaaaggctacaaaaagt

SEQ ID NO: 502 - DNA, 18 bp, synthetic construct
  source 1..18: mol_type = other DNA
gacaaaggctacaaaaag

SEQ ID NO: 503 - DNA, 18 bp, synthetic construct
  source 1..18: mol_type = other DNA
tgacaaaggctacaaaaa

SEQ ID NO: 504 - DNA, 18 bp, synthetic construct
  source 1..18: mol_type = other DNA
ctgacaaaggctacaaaa

SEQ ID NO: 505 - DNA, 18 bp, synthetic construct
  source 1..18: mol_type = other DNA
tctgacaaaggctacaaa

SEQ ID NO: 506 - DNA, 18 bp, synthetic construct
  source 1..18: mol_type = other DNA
ttctgacaaaggctacaa

SEQ ID NO: 507 - DNA, 18 bp, synthetic construct
  source 1..18: mol_type = other DNA
attctgacaaaggctaca

SEQ ID NO: 508 - DNA, 18 bp, synthetic construct
  source 1..18: mol_type = other DNA
aattctgacaaaggctac

SEQ ID NO: 509 - DNA, 18 bp, synthetic construct
  source 1..18: mol_type = other DNA
aaattctgacaaaggcta

SEQ ID NO: 510 - DNA, 18 bp, synthetic construct
  source 1..18: mol_type = other DNA
gaaattctgacaaaggct

SEQ ID NO: 511 - DNA, 18 bp, synthetic construct
  source 1..18: mol_type = other DNA
tgaaattctgacaaaggc

SEQ ID NO: 512 - DNA, 18 bp, synthetic construct
  source 1..18: mol_type = other DNA
atgaaattctgacaaagg

SEQ ID NO: 513 - DNA, 18 bp, synthetic construct
  source 1..18: mol_type = other DNA
aatgaaattctgacaaag

SEQ ID NO: 514 - DNA, 18 bp, synthetic construct
  source 1..18: mol_type = other DNA
gaatgaaattctgacaaa

SEQ ID NO: 515 - DNA, 18 bp, synthetic construct
  source 1..18: mol_type = other DNA
ggaatgaaattctgacaa

SEQ ID NO: 516 - DNA, 18 bp, synthetic construct
  source 1..18: mol_type = other DNA
aggaatgaaattctgaca

SEQ ID NO: 517 - DNA, 18 bp, synthetic construct
  source 1..18: mol_type = other DNA
aaggaatgaaattctgac

SEQ ID NO: 518 - DNA, 18 bp, synthetic construct
  source 1..18: mol_type = other DNA
aaaggaatgaaattctga

SEQ ID NO: 519 - DNA, 18 bp, synthetic construct
  source 1..18: mol_type = other DNA
aaaaggaatgaaattctg

SEQ ID NO: 520 - DNA, 18 bp, synthetic construct
  source 1..18: mol_type = other DNA
taaaaggaatgaaattct

SEQ ID NO: 521 - DNA, 18 bp, synthetic construct
  source 1..18: mol_type = other DNA
ttaaaaggaatgaaattc

SEQ ID NO: 522 - DNA, 18 bp, synthetic construct
  source 1..18: mol_type = other DNA
tttaaaaggaatgaaatt

SEQ ID NO: 523 - DNA, 18 bp, synthetic construct
  source 1..18: mol_type = other DNA
ctttaaaaggaatgaaat

SEQ ID NO: 524 - DNA, 18 bp, synthetic construct
  source 1..18: mol_type = other DNA
actttaaaaggaatgaaa

SEQ ID NO: 525 - DNA, 18 bp, synthetic construct
  source 1..18: mol_type = other DNA
cactttaaaaggaatgaa

SEQ ID NO: 526 - DNA, 18 bp, synthetic construct
  source 1..18: mol_type = other DNA
acactttaaaaggaatga

SEQ ID NO: 527 - DNA, 18 bp, synthetic construct
  source 1..18: mol_type = other DNA
cacactttaaaaggaatg

SEQ ID NO: 528 - DNA, 18 bp, synthetic construct
  source 1..18: mol_type = other DNA
acacactttaaaaggaat

SEQ ID NO: 529 - DNA, 18 bp, synthetic construct
  source 1..18: mol_type = other DNA
aacacactttaaaaggaa

SEQ ID NO: 530 - DNA, 18 bp, synthetic construct
  source 1..18: mol_type = other DNA
taacacactttaaaagga

SEQ ID NO: 531 - DNA, 18 bp, synthetic construct
  source 1..18: mol_type = other DNA
ataacacactttaaaagg

SEQ ID NO: 532 - DNA, 18 bp, synthetic construct
  source 1..18: mol_type = other DNA
aataacacactttaaaag

SEQ ID NO: 533 - DNA, 18 bp, synthetic construct
  source 1..18: mol_type = other DNA
gaataacacactttaaaa

SEQ ID NO: 534 - DNA, 18 bp, synthetic construct
  source 1..18: mol_type = other DNA
agaataacacactttaaa

SEQ ID NO: 535 - DNA, 18 bp, synthetic construct
  source 1..18: mol_type = other DNA
aagaataacacactttaa

SEQ ID NO: 536 - DNA, 18 bp, synthetic construct
  source 1..18: mol_type = other DNA
aaagaataacacacttta

SEQ ID NO: 537 - DNA, 18 bp, synthetic construct
  source 1..18: mol_type = other DNA
aaaagaataacacacttt

SEQ ID NO: 538 - DNA, 18 bp, synthetic construct
  source 1..18: mol_type = other DNA
aaaaagaataacacactt

SEQ ID NO: 539 - DNA, 18 bp, synthetic construct
  source 1..18: mol_type = other DNA
caaaaagaataacacact

SEQ ID NO: 540 - DNA, 18 bp, synthetic construct
  source 1..18: mol_type = other DNA
tcaaaaagaataacacac

SEQ ID NO: 541 - DNA, 18 bp, synthetic construct
  source 1..18: mol_type = other DNA
gtcaaaaagaataacaca

SEQ ID NO: 542 - DNA, 18 bp, synthetic construct
  source 1..18: mol_type = other DNA
tgtcaaaaagaataacac

SEQ ID NO: 543 - DNA, 18 bp, synthetic construct
  source 1..18: mol_type = other DNA
gtgtcaaaaagaataaca

SEQ ID NO: 544 - DNA, 18 bp, synthetic construct
  source 1..18: mol_type = other DNA
agtgtcaaaaagaataac

SEQ ID NO: 545 - DNA, 18 bp, synthetic construct
  source 1..18: mol_type = other DNA
aagtgtcaaaaagaataa

SEQ ID NO: 546 - DNA, 18 bp, synthetic construct
  source 1..18: mol_type = other DNA
taagtgtcaaaaagaata

SEQ ID NO: 547 - DNA, 18 bp, synthetic construct
  source 1..18: mol_type = other DNA
ttaagtgtcaaaaagaat

SEQ ID NO: 548 - DNA, 18 bp, synthetic construct
  source 1..18: mol_type = other DNA
tttaagtgtcaaaaagaa

SEQ ID NO: 549 - DNA, 18 bp, synthetic construct
  source 1..18: mol_type = other DNA
atttaagtgtcaaaaaga

SEQ ID NO: 550 - DNA, 18 bp, synthetic construct
  source 1..18: mol_type = other DNA
aatttaagtgtcaaaaag

SEQ ID NO: 551 - DNA, 18 bp, synthetic construct
  source 1..18: mol_type = other DNA
taatttaagtgtcaaaaa

SEQ ID NO: 552 - DNA, 18 bp, synthetic construct
  source 1..18: mol_type = other DNA
gtaatttaagtgtcaaaa

SEQ ID NO: 553 - DNA, 18 bp, synthetic construct
  source 1..18: mol_type = other DNA
tgtaatttaagtgtcaaa

SEQ ID NO: 554 - DNA, 18 bp, synthetic construct
  source 1..18: mol_type = other DNA
ttgtaatttaagtgtcaa

SEQ ID NO: 555 - DNA, 18 bp, synthetic construct
  source 1..18: mol_type = other DNA
gttgtaatttaagtgtca

SEQ ID NO: 556 - DNA, 18 bp, synthetic construct
  source 1..18: mol_type = other DNA
tgttgtaatttaagtgtc

SEQ ID NO: 557 - DNA, 18 bp, synthetic construct
  source 1..18: mol_type = other DNA
ttgttgtaatttaagtgt

SEQ ID NO: 558 - DNA, 18 bp, synthetic construct
  source 1..18: mol_type = other DNA
attgttgtaatttaagtg

SEQ ID NO: 559 - DNA, 18 bp, synthetic construct
  source 1..18: mol_type = other DNA
aattgttgtaatttaagt

SEQ ID NO: 560 - DNA, 18 bp, synthetic construct
  source 1..18: mol_type = other DNA
aaattgttgtaatttaag

SEQ ID NO: 561 - DNA, 18 bp, synthetic construct
  source 1..18: mol_type = other DNA
aaaattgttgtaatttaa

SEQ ID NO: 562 - DNA, 18 bp, synthetic construct
  source 1..18: mol_type = other DNA
caaaattgttgtaattta

SEQ ID NO: 563 - DNA, 18 bp, synthetic construct
  source 1..18: mol_type = other DNA
ccaaaattgttgtaattt

SEQ ID NO: 564 - DNA, 18 bp, synthetic construct
  source 1..18: mol_type = other DNA
gccaaaattgttgtaatt

SEQ ID NO: 565 - DNA, 18 bp, synthetic construct
  source 1..18: mol_type = other DNA
ggccaaaattgttgtaat

SEQ ID NO: 566 - DNA, 18 bp, synthetic construct
  source 1..18: mol_type = other DNA
aggccaaaattgttgtaa

SEQ ID NO: 567 - DNA, 18 bp, synthetic construct
  source 1..18: mol_type = other DNA
caggccaaaattgttgta

SEQ ID NO: 568 - DNA, 18 bp, synthetic construct
  source 1..18: mol_type = other DNA
acaggccaaaattgttgt

SEQ ID NO: 569 - DNA, 18 bp, synthetic construct
  source 1..18: mol_type = other DNA
cacaggccaaaattgttg

SEQ ID NO: 570 - DNA, 18 bp, synthetic construct
  source 1..18: mol_type = other DNA
ccacaggccaaaattgtt

SEQ ID NO: 571 - DNA, 18 bp, synthetic construct
  source 1..18: mol_type = other DNA
tccacaggccaaaattgt

SEQ ID NO: 572 - DNA, 18 bp, synthetic construct
  source 1..18: mol_type = other DNA
gtccacaggccaaaattg

SEQ ID NO: 573 - DNA, 18 bp, synthetic construct
  source 1..18: mol_type = other DNA
agtccacaggccaaaatt

SEQ ID NO: 574 - DNA, 18 bp, synthetic construct
  source 1..18: mol_type = other DNA
gagtccacaggccaaaat

SEQ ID NO: 575 - DNA, 18 bp, synthetic construct
  source 1..18: mol_type = other DNA
agagtccacaggccaaaa

SEQ ID NO: 576 - DNA, 18 bp, synthetic construct
  source 1..18: mol_type = other DNA
tagagtccacaggccaaa

SEQ ID NO: 577 - DNA, 18 bp, synthetic construct
  source 1..18: mol_type = other DNA
atagagtccacaggccaa

SEQ ID NO: 578 - DNA, 18 bp, synthetic construct
  source 1..18: mol_type = other DNA
aatagagtccacaggcca

SEQ ID NO: 579 - DNA, 18 bp, synthetic construct
  source 1..18: mol_type = other DNA
aaatagagtccacaggcc

SEQ ID NO: 580 - DNA, 18 bp, synthetic construct
  source 1..18: mol_type = other DNA
aaaatagagtccacaggc

SEQ ID NO: 581 - DNA, 18 bp, synthetic construct
  source 1..18: mol_type = other DNA
cttcacagcgggaactta

SEQ ID NO: 582 - DNA, 18 bp, synthetic construct
  source 1..18: mol_type = other DNA
tcttcacagcgggaactt

SEQ ID NO: 583 - DNA, 18 bp, synthetic construct
  source 1..18: mol_type = other DNA
ctcttcacagcgggaact

SEQ ID NO: 584 - DNA, 18 bp, synthetic construct
  source 1..18: mol_type = other DNA
cctcttcacagcgggaac

SEQ ID NO: 585 - DNA, 18 bp, synthetic construct
  source 1..18: mol_type = other DNA
tcctcttcacagcgggaa

SEQ ID NO: 586 - DNA, 18 bp, synthetic construct
  source 1..18: mol_type = other DNA
ttcctcttcacagcggga

SEQ ID NO: 587 - DNA, 18 bp, synthetic construct
  source 1..18: mol_type = other DNA
tttcctcttcacagcggg

SEQ ID NO: 588 - DNA, 18 bp, synthetic construct
  source 1..18: mol_type = other DNA
ctttcctcttcacagcgg

SEQ ID NO: 589 - DNA, 18 bp, synthetic construct
  source 1..18: mol_type = other DNA
gctttcctcttcacagcg

SEQ ID NO: 590 - DNA, 18 bp, synthetic construct
  source 1..18: mol_type = other DNA
ggctttcctcttcacagc

SEQ ID NO: 591 - DNA, 18 bp, synthetic construct
  source 1..18: mol_type = other DNA
aggctttcctcttcacag

SEQ ID NO: 592 - DNA, 18 bp, synthetic construct
  source 1..18: mol_type = other DNA
aaggctttcctcttcaca

SEQ ID NO: 593 - DNA, 18 bp, synthetic construct
  source 1..18: mol_type = other DNA
gaaggctttcctcttcac

SEQ ID NO: 594 - DNA, 18 bp, synthetic construct
  source 1..18: mol_type = other DNA
agaaggctttcctcttca

SEQ ID NO: 595 - DNA, 18 bp, synthetic construct
  source 1..18: mol_type = other DNA
tagaaggctttcctcttc

SEQ ID NO: 596 - DNA, 18 bp, synthetic construct
  source 1..18: mol_type = other DNA
ctagaaggctttcctctt

SEQ ID NO: 597 - DNA, 18 bp, synthetic construct
  source 1..18: mol_type = other DNA
gctagaaggctttcctct

SEQ ID NO: 598 - DNA, 18 bp, synthetic construct
  source 1..18: mol_type = other DNA
ggctagaaggctttcctc

SEQ ID NO: 599 - DNA, 18 bp, synthetic construct
  source 1..18: mol_type = other DNA
gggctagaaggctttcct

SEQ ID NO: 600 - DNA, 18 bp, synthetic construct
  source 1..18: mol_type = other DNA
cgggctagaaggctttcc

SEQ ID NO: 601 - DNA, 18 bp, synthetic construct
  source 1..18: mol_type = other DNA
tcgggctagaaggctttc

SEQ ID NO: 602 - DNA, 18 bp, synthetic construct
  source 1..18: mol_type = other DNA
ctcgggctagaaggcttt

SEQ ID NO: 603 - DNA, 18 bp, synthetic construct
  source 1..18: mol_type = other DNA
cctcgggctagaaggctt

SEQ ID NO: 604 - DNA, 18 bp, synthetic construct
  source 1..18: mol_type = other DNA
acctcgggctagaaggct

SEQ ID NO: 605 - DNA, 18 bp, synthetic construct
  source 1..18: mol_type = other DNA
gacctcgggctagaaggc

SEQ ID NO: 606 - DNA, 18 bp, synthetic construct
  source 1..18: mol_type = other DNA
cgacctcgggctagaagg

SEQ ID NO: 607 - DNA, 18 bp, synthetic construct
  source 1..18: mol_type = other DNA
tcgacctcgggctagaag

SEQ ID NO: 608 - DNA, 18 bp, synthetic construct
  source 1..18: mol_type = other DNA
atcgacctcgggctagaa

SEQ ID NO: 609 - DNA, 18 bp, synthetic construct
  source 1..18: mol_type = other DNA
gatcgacctcgggctaga

SEQ ID NO: 610 - DNA, 18 bp, synthetic construct
  source 1..18: mol_type = other DNA
agatcgacctcgggctag

SEQ ID NO: 611 - DNA, 18 bp, synthetic construct
  source 1..18: mol_type = other DNA
tagatcgacctcgggcta

SEQ ID NO: 612 - DNA, 18 bp, synthetic construct
  source 1..18: mol_type = other DNA
ctagatcgacctcgggct

SEQ ID NO: 613 - DNA, 18 bp, synthetic construct
  source 1..18: mol_type = other DNA
actagatcgacctcgggc

SEQ ID NO: 614 - DNA, 18 bp, synthetic construct
  source 1..18: mol_type = other DNA
cactagatcgacctcggg

SEQ ID NO: 615 - DNA, 18 bp, synthetic construct
  source 1..18: mol_type = other DNA
gcactagatcgacctcgg

SEQ ID NO: 616 - DNA, 18 bp, synthetic construct
  source 1..18: mol_type = other DNA
agcactagatcgacctcg

SEQ ID NO: 617 - DNA, 18 bp, synthetic construct
  source 1..18: mol_type = other DNA
gagcactagatcgacctc

SEQ ID NO: 618 - DNA, 18 bp, synthetic construct
  source 1..18: mol_type = other DNA
tgagcactagatcgacct

SEQ ID NO: 619 - DNA, 18 bp, synthetic construct
  source 1..18: mol_type = other DNA
ctgagcactagatcgacc

SEQ ID NO: 620 - DNA, 18 bp, synthetic construct
  source 1..18: mol_type = other DNA
tctgagcactagatcgac

SEQ ID NO: 621 - DNA, 18 bp, synthetic construct
  source 1..18: mol_type = other DNA
ttctgagcactagatcga

SEQ ID NO: 622 - DNA, 18 bp, synthetic construct
  source 1..18: mol_type = other DNA
gttctgagcactagatcg

SEQ ID NO: 623 - DNA, 18 bp, synthetic construct
  source 1..18: mol_type = other DNA
tgttctgagcactagatc

SEQ ID NO: 624 - DNA, 18 bp, synthetic construct
  source 1..18: mol_type = other DNA
ttgttctgagcactagat

SEQ ID NO: 625 - DNA, 18 bp, synthetic construct
  source 1..18: mol_type = other DNA
cttgttctgagcactaga

SEQ ID NO: 626 - DNA, 18 bp, synthetic construct
  source 1..18: mol_type = other DNA
gcttgttctgagcactag

SEQ ID NO: 627 - DNA, 18 bp, synthetic construct
  source 1..18: mol_type = other DNA
tgcttgttctgagcacta

SEQ ID NO: 628 - DNA, 18 bp, synthetic construct
  source 1..18: mol_type = other DNA
ctgcttgttctgagcact

SEQ ID NO: 629 - DNA, 18 bp, synthetic construct
  source 1..18: mol_type = other DNA
cctgcttgttctgagcac

SEQ ID NO: 630 - DNA, 18 bp, synthetic construct
  source 1..18: mol_type = other DNA
acctgcttgttctgagca

SEQ ID NO: 631 - DNA, 18 bp, synthetic construct
  source 1..18: mol_type = other DNA
cacctgcttgttctgagc

SEQ ID NO: 632 - DNA, 18 bp, synthetic construct
  source 1..18: mol_type = other DNA
ccacctgcttgttctgag

SEQ ID NO: 633 - DNA, 18 bp, synthetic construct
  source 1..18: mol_type = other DNA
tccacctgcttgttctga

SEQ ID NO: 634 - DNA, 18 bp, synthetic construct
  source 1..18: mol_type = other DNA
gtccacctgcttgttctg

SEQ ID NO: 635 - DNA, 18 bp, synthetic construct
  source 1..18: mol_type = other DNA
cgtccacctgcttgttct

SEQ ID NO: 636 - DNA, 18 bp, synthetic construct
  source 1..18: mol_type = other DNA
tcgtccacctgcttgttc

SEQ ID NO: 637 - DNA, 18 bp, synthetic construct
  source 1..18: mol_type = other DNA
ctcgtccacctgcttgtt

SEQ ID NO: 638 - DNA, 18 bp, synthetic construct
  source 1..18: mol_type = other DNA
tctcgtccacctgcttgt

SEQ ID NO: 639 - DNA, 18 bp, synthetic construct
  source 1..18: mol_type = other DNA
ttctcgtccacctgcttg

SEQ ID NO: 640 - DNA, 18 bp, synthetic construct
  source 1..18: mol_type = other DNA
attctcgtccacctgctt

SEQ ID NO: 641 - DNA, 18 bp, synthetic construct
  source 1..18: mol_type = other DNA
aattctcgtccacctgct

SEQ ID NO: 642 - DNA, 18 bp, synthetic construct
  source 1..18: mol_type = other DNA
gaattctcgtccacctgc

SEQ ID NO: 643 - DNA, 18 bp, synthetic construct
  source 1..18: mol_type = other DNA
agaattctcgtccacctg

SEQ ID NO: 644 - DNA, 18 bp, synthetic construct
  source 1..18: mol_type = other DNA
aagaattctcgtccacct

SEQ ID NO: 645 - DNA, 18 bp, synthetic construct
  source 1..18: mol_type = other DNA
aaagaattctcgtccacc

SEQ ID NO: 646 - DNA, 18 bp, synthetic construct
  source 1..18: mol_type = other DNA
caaagaattctcgtccac

SEQ ID NO: 647 - DNA, 18 bp, synthetic construct
  source 1..18: mol_type = other DNA
tcaaagaattctcgtcca

SEQ ID NO: 648 - DNA, 18 bp, synthetic construct
  source 1..18: mol_type = other DNA
atcaaagaattctcgtcc

SEQ ID NO: 649 - DNA, 18 bp, synthetic construct
  source 1..18: mol_type = other DNA
aatcaaagaattctcgtc

SEQ ID NO: 650 - DNA, 18 bp, synthetic construct
  source 1..18: mol_type = other DNA
aaatcaaagaattctcgt

SEQ ID NO: 651 - DNA, 18 bp, synthetic construct
  source 1..18: mol_type = other DNA
gaaatcaaagaattctcg

SEQ ID NO: 652 - DNA, 18 bp, synthetic construct
  source 1..18: mol_type = other DNA
tgaaatcaaagaattctc

SEQ ID NO: 653 - DNA, 18 bp, synthetic construct
  source 1..18: mol_type = other DNA
ttgaaatcaaagaattct

SEQ ID NO: 654 - DNA, 18 bp, synthetic construct
  source 1..18: mol_type = other DNA
gttgaaatcaaagaattc

SEQ ID NO: 655 - DNA, 18 bp, synthetic construct
  source 1..18: mol_type = other DNA
ggttgaaatcaaagaatt

SEQ ID NO: 656 - DNA, 18 bp, synthetic construct
  source 1..18: mol_type = other DNA
tggttgaaatcaaagaat

SEQ ID NO: 657 - DNA, 18 bp, synthetic construct
  source 1..18: mol_type = other DNA
ttggttgaaatcaaagaa

SEQ ID NO: 658 - DNA, 18 bp, synthetic construct
  source 1..18: mol_type = other DNA
tttggttgaaatcaaaga

SEQ ID NO: 659 - DNA, 18 bp, synthetic construct
  source 1..18: mol_type = other DNA
ctttggttgaaatcaaag

SEQ ID NO: 660 - DNA, 18 bp, synthetic construct
  source 1..18: mol_type = other DNA
tctttggttgaaatcaaa

SEQ ID NO: 661 - DNA, 18 bp, synthetic construct
  source 1..18: mol_type = other DNA
ttctttggttgaaatcaa

SEQ ID NO: 662 - DNA, 18 bp, synthetic construct
  source 1..18: mol_type = other DNA
cttctttggttgaaatca

SEQ ID NO: 663 - DNA, 18 bp, synthetic construct
  source 1..18: mol_type = other DNA
tcttctttggttgaaatc

SEQ ID NO: 664 - DNA, 18 bp, synthetic construct
  source 1..18: mol_type = other DNA
ctcttctttggttgaaat

SEQ ID NO: 665 - DNA, 18 bp, synthetic construct
  source 1..18: mol_type = other DNA
gctcttctttggttgaaa

SEQ ID NO: 666 - DNA, 18 bp, synthetic construct
  source 1..18: mol_type = other DNA
ggctcttctttggttgaa

SEQ ID NO: 667 - DNA, 18 bp, synthetic construct
  source 1..18: mol_type = other DNA
aggctcttctttggttga

SEQ ID NO: 668 - DNA, 18 bp, synthetic construct
  source 1..18: mol_type = other DNA
gaggctcttctttggttg

SEQ ID NO: 669 - DNA, 18 bp, synthetic construct
  source 1..18: mol_type = other DNA
ggaggctcttctttggtt

SEQ ID NO: 670 - DNA, 18 bp, synthetic construct
  source 1..18: mol_type = other DNA
tggaggctcttctttggt

SEQ ID NO: 671 - DNA, 18 bp, synthetic construct
  source 1..18: mol_type = other DNA
ctggaggctcttctttgg

SEQ ID NO: 672 - DNA, 18 bp, synthetic construct
  source 1..18: mol_type = other DNA
actggaggctcttctttg

SEQ ID NO: 673 - DNA, 18 bp, synthetic construct
  source 1..18: mol_type = other DNA
aactggaggctcttcttt

SEQ ID NO: 674 - DNA, 18 bp, synthetic construct
  source 1..18: mol_type = other DNA
gaactggaggctcttctt

SEQ ID NO: 675 - DNA, 18 bp, synthetic construct
  source 1..18: mol_type = other DNA
agaactggaggctcttct

SEQ ID NO: 676 - DNA, 18 bp, synthetic construct
  source 1..18: mol_type = other DNA
aagaactggaggctcttc

SEQ ID NO: 677 - DNA, 18 bp, synthetic construct
  source 1..18: mol_type = other DNA
caagaactggaggctctt

SEQ ID NO: 678 - DNA, 18 bp, synthetic construct
  source 1..18: mol_type = other DNA
tcaagaactggaggctct

SEQ ID NO: 679 - DNA, 18 bp, synthetic construct
  source 1..18: mol_type = other DNA
ttcaagaactggaggctc

SEQ ID NO: 680 - DNA, 18 bp, synthetic construct
  source 1..18: mol_type = other DNA
tttcaagaactggaggct

SEQ ID NO: 681 - DNA, 18 bp, synthetic construct
  source 1..18: mol_type = other DNA
ctttcaagaactggaggc

SEQ ID NO: 682 - DNA, 18 bp, synthetic construct
  source 1..18: mol_type = other DNA
cctttcaagaactggagg

SEQ ID NO: 683 - DNA, 18 bp, synthetic construct
  source 1..18: mol_type = other DNA
ccctttcaagaactggag

SEQ ID NO: 684 - DNA, 18 bp, synthetic construct
  source 1..18: mol_type = other DNA
tccctttcaagaactgga

SEQ ID NO: 685 - DNA, 18 bp, synthetic construct
  source 1..18: mol_type = other DNA
ctccctttcaagaactgg

SEQ ID NO: 686 - DNA, 18 bp, synthetic construct
  source 1..18: mol_type = other DNA
cctccctttcaagaactg

SEQ ID NO: 687 - DNA, 18 bp, synthetic construct
  source 1..18: mol_type = other DNA
gcctccctttcaagaact

SEQ ID NO: 688 - DNA, 18 bp, synthetic construct
  source 1..18: mol_type = other DNA
agcctccctttcaagaac

SEQ ID NO: 689 - DNA, 18 bp, synthetic construct
  source 1..18: mol_type = other DNA
gagcctccctttcaagaa

SEQ ID NO: 690 - DNA, 18 bp, synthetic construct
  source 1..18: mol_type = other DNA
ggagcctccctttcaaga

SEQ ID NO: 691 - DNA, 18 bp, synthetic construct
  source 1..18: mol_type = other DNA
cggagcctccctttcaag

SEQ ID NO: 692 - DNA, 18 bp, synthetic construct
  source 1..18: mol_type = other DNA
acggagcctccctttcaa

SEQ ID NO: 693 - DNA, 18 bp, synthetic construct
  source 1..18: mol_type = other DNA
aacggagcctccctttca

SEQ ID NO: 694 - DNA, 18 bp, synthetic construct
  source 1..18: mol_type = other DNA
aaacggagcctccctttc

SEQ ID NO: 695 - DNA, 18 bp, synthetic construct
  source 1..18: mol_type = other DNA
aaaacggagcctcccttt

SEQ ID NO: 696 - DNA, 18 bp, synthetic construct
  source 1..18: mol_type = other DNA
aaaaacggagcctccctt

SEQ ID NO: 697 - DNA, 18 bp, synthetic construct
  source 1..18: mol_type = other DNA
caaaaacggagcctccct

SEQ ID NO: 698 - DNA, 18 bp, synthetic construct
  source 1..18: mol_type = other DNA
ccaaaaacggagcctccc

SEQ ID NO: 699 - DNA, 18 bp, synthetic construct
  source 1..18: mol_type = other DNA
tccaaaaacggagcctcc

SEQ ID NO: 700 - DNA, 18 bp, synthetic construct
  source 1..18: mol_type = other DNA
ctccaaaaacggagcctc

SEQ ID NO: 701 - DNA, 18 bp, synthetic construct
  source 1..18: mol_type = other DNA
cctccaaaaacggagcct

SEQ ID NO: 702 - DNA, 18 bp, synthetic construct
  source 1..18: mol_type = other DNA
ccctccaaaaacggagcc

SEQ ID NO: 703 - DNA, 18 bp, synthetic construct
  source 1..18: mol_type = other DNA
gccctccaaaaacggagc

SEQ ID NO: 704 - DNA, 18 bp, synthetic construct
  source 1..18: mol_type = other DNA
ggccctccaaaaacggag

SEQ ID NO: 705 - DNA, 18 bp, synthetic construct
  source 1..18: mol_type = other DNA
gggccctccaaaaacgga

SEQ ID NO: 706 - DNA, 18 bp, synthetic construct
  source 1..18: mol_type = other DNA
ggggccctccaaaaacgg

SEQ ID NO: 707 - DNA, 18 bp, synthetic construct
  source 1..18: mol_type = other DNA
aggggccctccaaaaacg

SEQ ID NO: 708 - DNA, 18 bp, synthetic construct
  source 1..18: mol_type = other DNA
aaggggccctccaaaaac

SEQ ID NO: 709 - DNA, 18 bp, synthetic construct
  source 1..18: mol_type = other DNA
caaggggccctccaaaaa

SEQ ID NO: 710 - DNA, 18 bp, synthetic construct
  source 1..18: mol_type = other DNA
ccaaggggccctccaaaa

SEQ ID NO: 711 - DNA, 18 bp, synthetic construct
  source 1..18: mol_type = other DNA
gccaaggggccctccaaa

SEQ ID NO: 712 - DNA, 18 bp, synthetic construct
  source 1..18: mol_type = other DNA
agccaaggggccctccaa

SEQ ID NO: 713 - DNA, 18 bp, synthetic construct
  source 1..18: mol_type = other DNA
gagccaaggggccctcca

SEQ ID NO: 714 - DNA, 18 bp, synthetic construct
  source 1..18: mol_type = other DNA
tgagccaaggggccctcc

SEQ ID NO: 715 - DNA, 18 bp, synthetic construct
  source 1..18: mol_type = other DNA
ctgagccaaggggccctc

SEQ ID NO: 716 - DNA, 18 bp, synthetic construct
  source 1..18: mol_type = other DNA
actgagccaaggggccct

SEQ ID NO: 717 - DNA, 18 bp, synthetic construct
  source 1..18: mol_type = other DNA
gactgagccaaggggccc

SEQ ID NO: 718 - DNA, 18 bp, synthetic construct
  source 1..18: mol_type = other DNA
tgactgagccaaggggcc

SEQ ID NO: 719 - DNA, 18 bp, synthetic construct
  source 1..18: mol_type = other DNA
ctgactgagccaaggggc

SEQ ID NO: 720 - DNA, 18 bp, synthetic construct
  source 1..18: mol_type = other DNA
tctgactgagccaagggg

SEQ ID NO: 721 - DNA, 18 bp, synthetic construct
  source 1..18: mol_type = other DNA
ttctgactgagccaaggg

SEQ ID NO: 722 - DNA, 18 bp, synthetic construct
  source 1..18: mol_type = other DNA
gttctgactgagccaagg

SEQ ID NO: 723 - DNA, 18 bp, synthetic construct
  source 1..18: mol_type = other DNA
agttctgactgagccaag

SEQ ID NO: 724 - DNA, 18 bp, synthetic construct
  source 1..18: mol_type = other DNA
aagttctgactgagccaa

SEQ ID NO: 725 - DNA, 18 bp, synthetic construct
  source 1..18: mol_type = other DNA
caagttctgactgagcca

SEQ ID NO: 726 - DNA, 18 bp, synthetic construct
  source 1..18: mol_type = other DNA
ccaagttctgactgagcc

SEQ ID NO: 727 - DNA, 18 bp, synthetic construct
  source 1..18: mol_type = other DNA
tccaagttctgactgagc

SEQ ID NO: 728 - DNA, 18 bp, synthetic construct
  source 1..18: mol_type = other DNA
ctccaagttctgactgag

SEQ ID NO: 729 - DNA, 18 bp, synthetic construct
  source 1..18: mol_type = other DNA
cctccaagttctgactga

SEQ ID NO: 730 - DNA, 18 bp, synthetic construct
  source 1..18: mol_type = other DNA
acctccaagttctgactg

SEQ ID NO: 731 - DNA, 18 bp, synthetic construct
  source 1..18: mol_type = other DNA
cacctccaagttctgact

SEQ ID NO: 732 - DNA, 18 bp, synthetic construct
  source 1..18: mol_type = other DNA
ccacctccaagttctgac

SEQ ID NO: 733 - DNA, 18 bp, synthetic construct
  source 1..18: mol_type = other DNA
tccacctccaagttctga

SEQ ID NO: 734 - DNA, 18 bp, synthetic construct
  source 1..18: mol_type = other DNA
gtccacctccaagttctg

SEQ ID NO: 735 - DNA, 18 bp, synthetic construct
  source 1..18: mol_type = other DNA
tgtccacctccaagttct

SEQ ID NO: 736 - DNA, 18 bp, synthetic construct
  source 1..18: mol_type = other DNA
atgtccacctccaagttc

SEQ ID NO: 737 - DNA, 18 bp, synthetic construct
  source 1..18: mol_type = other DNA
catgtccacctccaagtt

SEQ ID NO: 738 - DNA, 18 bp, synthetic construct
  source 1..18: mol_type = other DNA
gcatgtccacctccaagt

SEQ ID NO: 739 - DNA, 18 bp, synthetic construct
  source 1..18: mol_type = other DNA
agcatgtccacctccaag

SEQ ID NO: 740 - DNA, 18 bp, synthetic construct
  source 1..18: mol_type = other DNA
cagcatgtccacctccaa

SEQ ID NO: 741 - DNA, 18 bp, synthetic construct
  source 1..18: mol_type = other DNA
tcagcatgtccacctcca

SEQ ID NO: 742 - DNA, 18 bp, synthetic construct
  source 1..18: mol_type = other DNA
ctcagcatgtccacctcc

SEQ ID NO: 743 - DNA, 18 bp, synthetic construct
  source 1..18: mol_type = other DNA
actcagcatgtccacctc

SEQ ID NO: 744 - DNA, 18 bp, synthetic construct
  source 1..18: mol_type = other DNA
aactcagcatgtccacct

SEQ ID NO: 745 - DNA, 18 bp, synthetic construct
  source 1..18: mol_type = other DNA
caactcagcatgtccacc

SEQ ID NO: 746 - DNA, 18 bp, synthetic construct
  source 1..18: mol_type = other DNA
gcaactcagcatgtccac

SEQ ID NO: 747 - DNA, 18 bp, synthetic construct
  source 1..18: mol_type = other DNA
ggcaactcagcatgtcca

SEQ ID NO: 748 - DNA, 18 bp, synthetic construct
  source 1..18: mol_type = other DNA
cggcaactcagcatgtcc

SEQ ID NO: 749 - DNA, 18 bp, synthetic construct
  source 1..18: mol_type = other DNA
gcggcaactcagcatgtc

SEQ ID NO: 750 - DNA, 18 bp, synthetic construct
  source 1..18: mol_type = other DNA
tgcggcaactcagcatgt

SEQ ID NO: 751 - DNA, 18 bp, synthetic construct
  source 1..18: mol_type = other DNA
ctgcggcaactcagcatg

SEQ ID NO: 752 - DNA, 18 bp, synthetic construct
  source 1..18: mol_type = other DNA
gctgcggcaactcagcat

SEQ ID NO: 753 - DNA, 18 bp, synthetic construct
  source 1..18: mol_type = other DNA
agctgcggcaactcagca

SEQ ID NO: 754 - DNA, 18 bp, synthetic construct
  source 1..18: mol_type = other DNA
cagctgcggcaactcagc

SEQ ID NO: 755 - DNA, 18 bp, synthetic construct
  source 1..18: mol_type = other DNA
tcagctgcggcaactcag

SEQ ID NO: 756 - DNA, 18 bp, synthetic construct
  source 1..18: mol_type = other DNA
gtcagctgcggcaactca

SEQ ID NO: 757 - DNA, 18 bp, synthetic construct
  source 1..18: mol_type = other DNA
ggtcagctgcggcaactc

SEQ ID NO: 758 - DNA, 18 bp, synthetic construct
  source 1..18: mol_type = other DNA
aggtcagctgcggcaact

SEQ ID NO: 759 - DNA, 18 bp, synthetic construct
  source 1..18: mol_type = other DNA
aaggtcagctgcggcaac

SEQ ID NO: 760 - DNA, 18 bp, synthetic construct
  source 1..18: mol_type = other DNA
caaggtcagctgcggcaa

SEQ ID NO: 761 - DNA, 18 bp, synthetic construct
  source 1..18: mol_type = other DNA
acaaggtcagctgcggca

SEQ ID NO: 762 - DNA, 18 bp, synthetic construct
  source 1..18: mol_type = other DNA
gacaaggtcagctgcggc

SEQ ID NO: 763 - DNA, 18 bp, synthetic construct
  source 1..18: mol_type = other DNA
agacaaggtcagctgcgg

SEQ ID NO: 764 - DNA, 18 bp, synthetic construct
  source 1..18: mol_type = other DNA
cagacaaggtcagctgcg

SEQ ID NO: 765 - DNA, 18 bp, synthetic construct
  source 1..18: mol_type = other DNA
acagacaaggtcagctgc

SEQ ID NO: 766 - DNA, 18 bp, synthetic construct
  source 1..18: mol_type = other DNA
cacagacaaggtcagctg

SEQ ID NO: 767 - DNA, 18 bp, synthetic construct
  source 1..18: mol_type = other DNA
gcacagacaaggtcagct

SEQ ID NO: 768 - DNA, 18 bp, synthetic construct
  source 1..18: mol_type = other DNA
ggcacagacaaggtcagc

SEQ ID NO: 769 - DNA, 18 bp, synthetic construct
  source 1..18: mol_type = other DNA
aggcacagacaaggtcag

SEQ ID NO: 770 - DNA, 18 bp, synthetic construct
  source 1..18: mol_type = other DNA
caggcacagacaaggtca

SEQ ID NO: 771 - DNA, 18 bp, synthetic construct
  source 1..18: mol_type = other DNA
acaggcacagacaaggtc

SEQ ID NO: 772 - DNA, 18 bp, synthetic construct
  source 1..18: mol_type = other DNA
cacaggcacagacaaggt

SEQ ID NO: 773 - DNA, 18 bp, synthetic construct
  source 1..18: mol_type = other DNA
ccacaggcacagacaagg

SEQ ID NO: 774 - DNA, 18 bp, synthetic construct
  source 1..18: mol_type = other DNA
gccacaggcacagacaag

SEQ ID NO: 775 - DNA, 18 bp, synthetic construct
  source 1..18: mol_type = other DNA
agccacaggcacagacaa

SEQ ID NO: 776 - DNA, 18 bp, synthetic construct
  source 1..18: mol_type = other DNA
gagccacaggcacagaca

SEQ ID NO: 777 - DNA, 18 bp, synthetic construct
  source 1..18: mol_type = other DNA
ggagccacaggcacagac

SEQ ID NO: 778 - DNA, 18 bp, synthetic construct
  source 1..18: mol_type = other DNA
cggagccacaggcacaga

SEQ ID NO: 779 - DNA, 18 bp, synthetic construct
  source 1..18: mol_type = other DNA
ccggagccacaggcacag

SEQ ID NO: 780 - DNA, 18 bp, synthetic construct
  source 1..18: mol_type = other DNA
tccggagccacaggcaca

SEQ ID NO: 781 - DNA, 18 bp, synthetic construct
  source 1..18: mol_type = other DNA
ttccggagccacaggcac

SEQ ID NO: 782 - DNA, 18 bp, synthetic construct
  source 1..18: mol_type = other DNA
cttccggagccacaggca

SEQ ID NO: 783 - DNA, 18 bp, synthetic construct
  source 1..18: mol_type = other DNA
acttccggagccacaggc

SEQ ID NO: 784 - DNA, 18 bp, synthetic construct
  source 1..18: mol_type = other DNA
gacttccggagccacagg

SEQ ID NO: 785 - DNA, 18 bp, synthetic construct
  source 1..18: mol_type = other DNA
agacttccggagccacag

SEQ ID NO: 786 - DNA, 18 bp, synthetic construct
  source 1..18: mol_type = other DNA
gagacttccggagccaca

SEQ ID NO: 787 - DNA, 18 bp, synthetic construct
  source 1..18: mol_type = other DNA
agagacttccggagccac

SEQ ID NO: 788 - DNA, 18 bp, synthetic construct
  source 1..18: mol_type = other DNA
gagagacttccggagcca

SEQ ID NO: 789 - DNA, 18 bp, synthetic construct
  source 1..18: mol_type = other DNA
ggagagacttccggagcc

SEQ ID NO: 790 - DNA, 18 bp, synthetic construct
  source 1..18: mol_type = other DNA
tggagagacttccggagc

SEQ ID NO: 791 - DNA, 18 bp, synthetic construct
  source 1..18: mol_type = other DNA
gtggagagacttccggag

SEQ ID NO: 792 - DNA, 18 bp, synthetic construct
  source 1..18: mol_type = other DNA
cgtggagagacttccgga

SEQ ID NO: 793 - DNA, 18 bp, synthetic construct
  source 1..18: mol_type = other DNA
ccgtggagagacttccgg

SEQ ID NO: 794 - DNA, 18 bp, synthetic construct
  source 1..18: mol_type = other DNA
gccgtggagagacttccg

SEQ ID NO: 795 - DNA, 18 bp, synthetic construct
  source 1..18: mol_type = other DNA
ggccgtggagagacttcc

SEQ ID NO: 796 - DNA, 18 bp, synthetic construct
  source 1..18: mol_type = other DNA
aggccgtggagagacttc

SEQ ID NO: 797 - DNA, 18 bp, synthetic construct
  source 1..18: mol_type = other DNA
caggccgtggagagactt

SEQ ID NO: 798 - DNA, 18 bp, synthetic construct
  source 1..18: mol_type = other DNA
gcaggccgtggagagact

SEQ ID NO: 799 - DNA, 18 bp, synthetic construct
  source 1..18: mol_type = other DNA
ggcaggccgtggagagac

SEQ ID NO: 800 - DNA, 18 bp, synthetic construct
  source 1..18: mol_type = other DNA
gggcaggccgtggagaga

SEQ ID NO: 801 - DNA, 18 bp, synthetic construct
  source 1..18: mol_type = other DNA
agggcaggccgtggagag

SEQ ID NO: 802 - DNA, 18 bp, synthetic construct
  source 1..18: mol_type = other DNA
aagggcaggccgtggaga

SEQ ID NO: 803 - DNA, 18 bp, synthetic construct
  source 1..18: mol_type = other DNA
caagggcaggccgtggag

SEQ ID NO: 804 - DNA, 18 bp, synthetic construct
  source 1..18: mol_type = other DNA
tcaagggcaggccgtgga

SEQ ID NO: 805 - DNA, 18 bp, synthetic construct
  source 1..18: mol_type = other DNA
ctcaagggcaggccgtgg

SEQ ID NO: 806 - DNA, 18 bp, synthetic construct
  source 1..18: mol_type = other DNA
actcaagggcaggccgtg

SEQ ID NO: 807 - DNA, 18 bp, synthetic construct
  source 1..18: mol_type = other DNA
gactcaagggcaggccgt

SEQ ID NO: 808 - DNA, 18 bp, synthetic construct
  source 1..18: mol_type = other DNA
agactcaagggcaggccg

SEQ ID NO: 809 - DNA, 18 bp, synthetic construct
  source 1..18: mol_type = other DNA
cagactcaagggcaggcc

SEQ ID NO: 810 - DNA, 18 bp, synthetic construct
  source 1..18: mol_type = other DNA
tcagactcaagggcaggc

SEQ ID NO: 811 - DNA, 18 bp, synthetic construct
  source 1..18: mol_type = other DNA
ctcagactcaagggcagg

SEQ ID NO: 812 - DNA, 18 bp, synthetic construct
  source 1..18: mol_type = other DNA
cctcagactcaagggcag

SEQ ID NO: 813 - DNA, 18 bp, synthetic construct
  source 1..18: mol_type = other DNA
tcctcagactcaagggca

SEQ ID NO: 814 - DNA, 18 bp, synthetic construct
  source 1..18: mol_type = other DNA
ttcctcagactcaagggc

SEQ ID NO: 815 - DNA, 18 bp, synthetic construct
  source 1..18: mol_type = other DNA
attcctcagactcaaggg

SEQ ID NO: 816 - DNA, 18 bp, synthetic construct
  source 1..18: mol_type = other DNA
aattcctcagactcaagg

SEQ ID NO: 817 - DNA, 18 bp, synthetic construct
  source 1..18: mol_type = other DNA
caattcctcagactcaag

SEQ ID NO: 818 - DNA, 18 bp, synthetic construct
  source 1..18: mol_type = other DNA
gcaattcctcagactcaa

SEQ ID NO: 819 - DNA, 18 bp, synthetic construct
  source 1..18: mol_type = other DNA
agcaattcctcagactca

SEQ ID NO: 820 - DNA, 18 bp, synthetic construct
  source 1..18: mol_type = other DNA
tagcaattcctcagactc

SEQ ID NO: 821 - DNA, 18 bp, synthetic construct
  source 1..18: mol_type = other DNA
ctagcaattcctcagact

SEQ ID NO: 822 - DNA, 18 bp, synthetic construct
  source 1..18: mol_type = other DNA
actagcaattcctcagac

SEQ ID NO: 823 - DNA, 18 bp, synthetic construct
  source 1..18: mol_type = other DNA
aactagcaattcctcaga

SEQ ID NO: 824 - DNA, 18 bp, synthetic construct
  source 1..18: mol_type = other DNA
taactagcaattcctcag

SEQ ID NO: 825 - DNA, 18 bp, synthetic construct
  source 1..18: mol_type = other DNA
ttaactagcaattcctca

SEQ ID NO: 826 - DNA, 18 bp, synthetic construct
  source 1..18: mol_type = other DNA
tttaactagcaattcctc

SEQ ID NO: 827 - DNA, 18 bp, synthetic construct
  source 1..18: mol_type = other DNA
ttttaactagcaattcct

SEQ ID NO: 828 - DNA, 18 bp, synthetic construct
  source 1..18: mol_type = other DNA
gttttaactagcaattcc

SEQ ID NO: 829 - DNA, 18 bp, synthetic construct
  source 1..18: mol_type = other DNA
cgttttaactagcaattc

SEQ ID NO: 830 - DNA, 18 bp, synthetic construct
  source 1..18: mol_type = other DNA
tactgagaccccaacccc

SEQ ID NO: 831 - DNA, 18 bp, synthetic construct
  source 1..18: mol_type = other DNA
atactgagaccccaaccc

SEQ ID NO: 832 - DNA, 18 bp, synthetic construct
  source 1..18: mol_type = other DNA
aatactgagaccccaacc

SEQ ID NO: 833 - DNA, 18 bp, synthetic construct
  source 1..18: mol_type = other DNA
aaatactgagaccccaac

SEQ ID NO: 834 - DNA, 18 bp, synthetic construct
  source 1..18: mol_type = other DNA
caaatactgagaccccaa

SEQ ID NO: 835 - DNA, 18 bp, synthetic construct
  source 1..18: mol_type = other DNA
tcaaatactgagacccca

SEQ ID NO: 836 - DNA, 18 bp, synthetic construct
  source 1..18: mol_type = other DNA
ctcaaatactgagacccc

SEQ ID NO: 837 - DNA, 18 bp, synthetic construct
  source 1..18: mol_type = other DNA
gctcaaatactgagaccc

SEQ ID NO: 838 - DNA, 18 bp, synthetic construct
  source 1..18: mol_type = other DNA
tgctcaaatactgagacc

SEQ ID NO: 839 - DNA, 18 bp, synthetic construct
  source 1..18: mol_type = other DNA
ctgctcaaatactgagac

SEQ ID NO: 840 - DNA, 18 bp, synthetic construct
  source 1..18: mol_type = other DNA
tctgctcaaatactgaga

SEQ ID NO: 841 - DNA, 18 bp, synthetic construct
  source 1..18: mol_type = other DNA
atctgctcaaatactgag

SEQ ID NO: 842 - DNA, 18 bp, synthetic construct
  source 1..18: mol_type = other DNA
tatctgctcaaatactga

SEQ ID NO: 843 - DNA, 18 bp, synthetic construct
  source 1..18: mol_type = other DNA
atatctgctcaaatactg

SEQ ID NO: 844 - DNA, 18 bp, synthetic construct
  source 1..18: mol_type = other DNA
catatctgctcaaatact

SEQ ID NO: 845 - DNA, 18 bp, synthetic construct
  source 1..18: mol_type = other DNA
tcatatctgctcaaatac

SEQ ID NO: 846 - DNA, 18 bp, synthetic construct
  source 1..18: mol_type = other DNA
atcatatctgctcaaata

SEQ ID NO: 847 - DNA, 18 bp, synthetic construct
  source 1..18: mol_type = other DNA
aatcatatctgctcaaat

SEQ ID NO: 848 - DNA, 18 bp, synthetic construct
  source 1..18: mol_type = other DNA
taatcatatctgctcaaa

SEQ ID NO: 849 - DNA, 18 bp, synthetic construct
  source 1..18: mol_type = other DNA
ctaatcatatctgctcaa

SEQ ID NO: 850 - DNA, 18 bp, synthetic construct
  source 1..18: mol_type = other DNA
tctaatcatatctgctca

SEQ ID NO: 851 - DNA, 18 bp, synthetic construct
  source 1..18: mol_type = other DNA
ctctaatcatatctgctc

SEQ ID NO: 852 - DNA, 18 bp, synthetic construct
  source 1..18: mol_type = other DNA
cctctaatcatatctgct

SEQ ID NO: 853 - DNA, 18 bp, synthetic construct
  source 1..18: mol_type = other DNA
tcctctaatcatatctgc

SEQ ID NO: 854 - DNA, 18 bp, synthetic construct
  source 1..18: mol_type = other DNA
ttcctctaatcatatctg

SEQ ID NO: 855 - DNA, 18 bp, synthetic construct
  source 1..18: mol_type = other DNA
cttcctctaatcatatct

SEQ ID NO: 856 - DNA, 18 bp, synthetic construct
  source 1..18: mol_type = other DNA
gcttcctctaatcatatc

SEQ ID NO: 857 - DNA, 18 bp, synthetic construct
  source 1..18: mol_type = other DNA
tgcttcctctaatcatat

SEQ ID NO: 858 - DNA, 18 bp, synthetic construct
  source 1..18: mol_type = other DNA
ctgcttcctctaatcata

SEQ ID NO: 859 - DNA, 18 bp, synthetic construct
  source 1..18: mol_type = other DNA
cctgcttcctctaatcat

SEQ ID NO: 860 - DNA, 18 bp, synthetic construct
  source 1..18: mol_type = other DNA
tcctgcttcctctaatca

SEQ ID NO: 861 - DNA, 18 bp, synthetic construct
  source 1..18: mol_type = other DNA
ctcctgcttcctctaatc

SEQ ID NO: 862 - DNA, 18 bp, synthetic construct
  source 1..18: mol_type = other DNA
tctcctgcttcctctaat

SEQ ID NO: 863 - DNA, 18 bp, synthetic construct
  source 1..18: mol_type = other DNA
atctcctgcttcctctaa

SEQ ID NO: 864 - DNA, 18 bp, synthetic construct
  source 1..18: mol_type = other DNA
aatctcctgcttcctcta

SEQ ID NO: 865 - DNA, 18 bp, synthetic construct
  source 1..18: mol_type = other DNA
aaatctcctgcttcctct

SEQ ID NO: 866 - DNA, 18 bp, synthetic construct
  source 1..18: mol_type = other DNA
aaaatctcctgcttcctc

SEQ ID NO: 867 - DNA, 18 bp, synthetic construct
  source 1..18: mol_type = other DNA
taaaatctcctgcttcct

SEQ ID NO: 868 - DNA, 18 bp, synthetic construct
  source 1..18: mol_type = other DNA
ctaaaatctcctgcttcc

SEQ ID NO: 869 - DNA, 18 bp, synthetic construct
  source 1..18: mol_type = other DNA
actaaaatctcctgcttc

SEQ ID NO: 870 - DNA, 18 bp, synthetic construct
  source 1..18: mol_type = other DNA
tactaaaatctcctgctt

SEQ ID NO: 871 - DNA, 18 bp, synthetic construct
  source 1..18: mol_type = other DNA
atactaaaatctcctgct

SEQ ID NO: 872 - DNA, 18 bp, synthetic construct
  source 1..18: mol_type = other DNA
catactaaaatctcctgc

SEQ ID NO: 873 - DNA, 18 bp, synthetic construct
  source 1..18: mol_type = other DNA
acatactaaaatctcctg

SEQ ID NO: 874 - DNA, 18 bp, synthetic construct
  source 1..18: mol_type = other DNA
aacatactaaaatctcct

SEQ ID NO: 875 - DNA, 18 bp, synthetic construct
  source 1..18: mol_type = other DNA
aaacatactaaaatctcc

SEQ ID NO: 876 - DNA, 18 bp, synthetic construct
  source 1..18: mol_type = other DNA
aaaacatactaaaatctc

SEQ ID NO: 877 - DNA, 18 bp, synthetic construct
  source 1..18: mol_type = other DNA
caaaacatactaaaatct

SEQ ID NO: 878 - DNA, 18 bp, synthetic construct
  source 1..18: mol_type = other DNA
tcaaaacatactaaaatc

SEQ ID NO: 879 - DNA, 18 bp, synthetic construct
  source 1..18: mol_type = other DNA
atcaaaacatactaaaat

SEQ ID NO: 880 - DNA, 18 bp, synthetic construct
  source 1..18: mol_type = other DNA
catcaaaacatactaaaa

SEQ ID NO: 881 - DNA, 18 bp, synthetic construct
  source 1..18: mol_type = other DNA
acatcaaaacatactaaa

SEQ ID NO: 882 - DNA, 18 bp, synthetic construct
  source 1..18: mol_type = other DNA
tacatcaaaacatactaa

SEQ ID NO: 883 - DNA, 18 bp, synthetic construct
  source 1..18: mol_type = other DNA
ttacatcaaaacatacta

SEQ ID NO: 884 - DNA, 18 bp, synthetic construct
  source 1..18: mol_type = other DNA
tttacatcaaaacatact

SEQ ID NO: 885 - DNA, 18 bp, synthetic construct
  source 1..18: mol_type = other DNA
ctttacatcaaaacatac

SEQ ID NO: 886 - DNA, 18 bp, synthetic construct
  source 1..18: mol_type = other DNA
gctttacatcaaaacata

SEQ ID NO: 887 - DNA, 18 bp, synthetic construct
  source 1..18: mol_type = other DNA
ggctttacatcaaaacat

SEQ ID NO: 888 - DNA, 18 bp, synthetic construct
  source 1..18: mol_type = other DNA
tggctttacatcaaaaca

SEQ ID NO: 889 - DNA, 18 bp, synthetic construct
  source 1..18: mol_type = other DNA
ttggctttacatcaaaac

SEQ ID NO: 890 - DNA, 18 bp, synthetic construct
  source 1..18: mol_type = other DNA
gttggctttacatcaaaa

SEQ ID NO: 891 - DNA, 18 bp, synthetic construct
  source 1..18: mol_type = other DNA
tgttggctttacatcaaa

SEQ ID NO: 892 - DNA, 18 bp, synthetic construct
  source 1..18: mol_type = other DNA
atgttggctttacatcaa

SEQ ID NO: 893 - DNA, 18 bp, synthetic construct
  source 1..18: mol_type = other DNA
aatgttggctttacatca

SEQ ID NO: 894 - DNA, 18 bp, synthetic construct
  source 1..18: mol_type = other DNA
caatgttggctttacatc

SEQ ID NO: 895 - DNA, 18 bp, synthetic construct
  source 1..18: mol_type = other DNA
acaatgttggctttacat

SEQ ID NO: 896 - DNA, 18 bp, synthetic construct
  source 1..18: mol_type = other DNA
tacaatgttggctttaca

SEQ ID NO: 897 - DNA, 18 bp, synthetic construct
  source 1..18: mol_type = other DNA
atacaatgttggctttac

SEQ ID NO: 898 - DNA, 18 bp, synthetic construct
  source 1..18: mol_type = other DNA
gatacaatgttggcttta

SEQ ID NO: 899 - DNA, 18 bp, synthetic construct
  source 1..18: mol_type = other DNA
agatacaatgttggcttt

SEQ ID NO: 900 - DNA, 18 bp, synthetic construct
  source 1..18: mol_type = other DNA
tagatacaatgttggctt

SEQ ID NO: 901 - DNA, 18 bp, synthetic construct
  source 1..18: mol_type = other DNA
atagatacaatgttggct

SEQ ID NO: 902 - DNA, 18 bp, synthetic construct
  source 1..18: mol_type = other DNA
tatagatacaatgttggc

SEQ ID NO: 903 - DNA, 18 bp, synthetic construct
  source 1..18: mol_type = other DNA
atatagatacaatgttgg

SEQ ID NO: 904 - DNA, 18 bp, synthetic construct
  source 1..18: mol_type = other DNA
tatatagatacaatgttg

SEQ ID NO: 905 - DNA, 18 bp, synthetic construct
  source 1..18: mol_type = other DNA
gtatatagatacaatgtt

SEQ ID NO: 906 - DNA, 18 bp, synthetic construct
  source 1..18: mol_type = other DNA
tgtatatagatacaatgt

SEQ ID NO: 907 - DNA, 18 bp, synthetic construct
  source 1..18: mol_type = other DNA
ttgtatatagatacaatg

SEQ ID NO: 908 - DNA, 18 bp, synthetic construct
  source 1..18: mol_type = other DNA
attgtatatagatacaat

SEQ ID NO: 909 - DNA, 18 bp, synthetic construct
  source 1..18: mol_type = other DNA
tattgtatatagatacaa

SEQ ID NO: 910 - DNA, 18 bp, synthetic construct
  source 1..18: mol_type = other DNA
ttattgtatatagataca

SEQ ID NO: 911 - DNA, 18 bp, synthetic construct
  source 1..18: mol_type = other DNA
tttattgtatatagatac

SEQ ID NO: 912 - DNA, 18 bp, synthetic construct
  source 1..18: mol_type = other DNA
gtttattgtatatagata

SEQ ID NO: 913 - DNA, 18 bp, synthetic construct
  source 1..18: mol_type = other DNA
agtttattgtatatagat

SEQ ID NO: 914 - DNA, 18 bp, synthetic construct
  source 1..18: mol_type = other DNA
tagtttattgtatataga

SEQ ID NO: 915 - DNA, 18 bp, synthetic construct
  source 1..18: mol_type = other DNA
gtagtttattgtatatag

SEQ ID NO: 916 - DNA, 18 bp, synthetic construct
  source 1..18: mol_type = other DNA
ggtagtttattgtatata

SEQ ID NO: 917 - DNA, 18 bp, synthetic construct
  source 1..18: mol_type = other DNA
gggtagtttattgtatat

SEQ ID NO: 918 - DNA, 18 bp, synthetic construct
  source 1..18: mol_type = other DNA
ggggtagtttattgtata

SEQ ID NO: 919 - DNA, 18 bp, synthetic construct
  source 1..18: mol_type = other DNA
gggggtagtttattgtat

SEQ ID NO: 920 - DNA, 18 bp, synthetic construct
  source 1..18: mol_type = other DNA
agggggtagtttattgta

SEQ ID NO: 921 - DNA, 18 bp, synthetic construct
  source 1..18: mol_type = other DNA
aagggggtagtttattgt

SEQ ID NO: 922 - DNA, 18 bp, synthetic construct
  source 1..18: mol_type = other DNA
aaagggggtagtttattg

SEQ ID NO: 923 - DNA, 18 bp, synthetic construct
  source 1..18: mol_type = other DNA
aaaagggggtagtttatt

SEQ ID NO: 924 - DNA, 18 bp, synthetic construct
  source 1..18: mol_type = other DNA
caaaagggggtagtttat

SEQ ID NO: 925 - DNA, 18 bp, synthetic construct
  source 1..18: mol_type = other DNA
acaaaagggggtagttta

SEQ ID NO: 926 - DNA, 20 bp, synthetic construct
  source 1..20: mol_type = other DNA
aaggctacaaaaagtggatg

SEQ ID NO: 927 - DNA, 19 bp, synthetic construct
  source 1..19: mol_type = other DNA
aaggctacaaaaagtggat

SEQ ID NO: 928 - DNA, 18 bp, synthetic construct
  source 1..18: mol_type = other DNA
aaggctacaaaaagtgga

SEQ ID NO: 929 - DNA, 18 bp, synthetic construct
  source 1..18: mol_type = other DNA
aaaggctacaaaaagtgg

SEQ ID NO: 930 - DNA, 20 bp, synthetic construct
  source 1..20: mol_type = other DNA
aacaaaggctacaaaaagtg

SEQ ID NO: 931 - DNA, 19 bp, synthetic construct
  source 1..19: mol_type = other DNA
aacaaaggctacaaaaagt

SEQ ID NO: 932 - DNA, 20 bp, synthetic construct
  source 1..20: mol_type = other DNA
aagacaaaggctacaaaaag

SEQ ID NO: 933 - DNA, 20 bp, synthetic construct
  source 1..20: mol_type = other DNA
aatgacaaaggctacaaaaa

SEQ ID NO: 934 - DNA, 20 bp, synthetic construct
  source 1..20: mol_type = other DNA
aactgacaaaggctacaaaa

SEQ ID NO: 935 - DNA, 20 bp, synthetic construct
  source 1..20: mol_type = other DNA
aatctgacaaaggctacaaa

SEQ ID NO: 936 - DNA, 20 bp, synthetic construct
  source 1..20: mol_type = other DNA
aattctgacaaaggctacaa

SEQ ID NO: 937 - DNA, 19 bp, synthetic construct
  source 1..19: mol_type = other DNA
aattctgacaaaggctaca

SEQ ID NO: 938 - DNA, 18 bp, synthetic construct
  source 1..18: mol_type = other DNA
aattctgacaaaggctac

SEQ ID NO: 939 - DNA, 18 bp, synthetic construct
  source 1..18: mol_type = other DNA
aaattctgacaaaggcta

SEQ ID NO: 940 - DNA, 20 bp, synthetic construct
  source 1..20: mol_type = other DNA
aagaaattctgacaaaggct

SEQ ID NO: 941 - DNA, 20 bp, synthetic construct
  source 1..20: mol_type = other DNA
aatgaaattctgacaaaggc

SEQ ID NO: 942 - DNA, 19 bp, synthetic construct
  source 1..19: mol_type = other DNA
aatgaaattctgacaaagg

SEQ ID NO: 943 - DNA, 18 bp, synthetic construct
  source 1..18: mol_type = other DNA
aatgaaattctgacaaag

SEQ ID NO: 944 - DNA, 20 bp, synthetic construct
  source 1..20: mol_type = other DNA
aagaatgaaattctgacaaa

SEQ ID NO: 945 - DNA, 20 bp, synthetic construct
  source 1..20: mol_type = other DNA
aaggaatgaaattctgacaa

SEQ ID NO: 946 - DNA, 19 bp, synthetic construct
  source 1..19: mol_type = other DNA
aaggaatgaaattctgaca

SEQ ID NO: 947 - DNA, 18 bp, synthetic construct
  source 1..18: mol_type = other DNA
aaggaatgaaattctgac

SEQ ID NO: 948 - DNA, 18 bp, synthetic construct
  source 1..18: mol_type = other DNA
aaaggaatgaaattctga

SEQ ID NO: 949 - DNA, 18 bp, synthetic construct
  source 1..18: mol_type = other DNA
aaaaggaatgaaattctg

SEQ ID NO: 950 - DNA, 20 bp, synthetic construct
  source 1..20: mol_type = other DNA
aataaaaggaatgaaattct

SEQ ID NO: 951 - DNA, 20 bp, synthetic construct
  source 1..20: mol_type = other DNA
aattaaaaggaatgaaattc

SEQ ID NO: 952 - DNA, 20 bp, synthetic construct
  source 1..20: mol_type = other DNA
aatttaaaaggaatgaaatt

SEQ ID NO: 953 - DNA, 20 bp, synthetic construct
  source 1..20: mol_type = other DNA
aactttaaaaggaatgaaat

SEQ ID NO: 954 - DNA, 19 bp, synthetic construct
  source 1..19: mol_type = other DNA
aactttaaaaggaatgaaa

SEQ ID NO: 955 - DNA, 18 bp, synthetic construct
  source 1..18: mol_type = other DNA
cactttaaaaggaatgaa

SEQ ID NO: 956 - DNA, 19 bp, synthetic construct
  source 1..19: mol_type = other DNA
aacactttaaaaggaatga

SEQ ID NO: 957 - DNA, 20 bp, synthetic construct
  source 1..20: mol_type = other DNA
aacacactttaaaaggaatg

SEQ ID NO: 958 - DNA, 19 bp, synthetic construct
  source 1..19: mol_type = other DNA
aacacactttaaaaggaat

SEQ ID NO: 959 - DNA, 18 bp, synthetic construct
  source 1..18: mol_type = other DNA
aacacactttaaaaggaa

SEQ ID NO: 960 - DNA, 20 bp, synthetic construct
  source 1..20: mol_type = other DNA
aataacacactttaaaagga

SEQ ID NO: 961 - DNA, 19 bp, synthetic construct
  source 1..19: mol_type = other DNA
aataacacactttaaaagg

SEQ ID NO: 962 - DNA, 18 bp, synthetic construct
  source 1..18: mol_type = other DNA
aataacacactttaaaag

SEQ ID NO: 963 - DNA, 20 bp, synthetic construct
  source 1..20: mol_type = other DNA
aagaataacacactttaaaa

SEQ ID NO: 964 - DNA, 19 bp, synthetic construct
  source 1..19: mol_type = other DNA
aagaataacacactttaaa

SEQ ID NO: 965 - DNA, 18 bp, synthetic construct
  source 1..18: mol_type = other DNA
aagaataacacactttaa

SEQ ID NO: 966 - DNA, 18 bp, synthetic construct
  source 1..18: mol_type = other DNA
aaagaataacacacttta

SEQ ID NO: 967 - DNA, 18 bp, synthetic construct
  source 1..18: mol_type = other DNA
aaaagaataacacacttt

SEQ ID NO: 968 - DNA, 18 bp, synthetic construct
  source 1..18: mol_type = other DNA
aaaaagaataacacactt

SEQ ID NO: 969 - DNA, 20 bp, synthetic construct
  source 1..20: mol_type = other DNA
aacaaaaagaataacacact

SEQ ID NO: 970 - DNA, 20 bp, synthetic construct
  source 1..20: mol_type = other DNA
aatcaaaaagaataacacac

SEQ ID NO: 971 - DNA, 20 bp, synthetic construct
  source 1..20: mol_type = other DNA
aagtcaaaaagaataacaca

SEQ ID NO: 972 - DNA, 20 bp, synthetic construct
  source 1..20: mol_type = other DNA
aatgtcaaaaagaataacac

SEQ ID NO: 973 - DNA, 20 bp, synthetic construct
  source 1..20: mol_type = other DNA
aagtgtcaaaaagaataaca

SEQ ID NO: 974 - DNA, 19 bp, synthetic construct
  source 1..19: mol_type = other DNA
aagtgtcaaaaagaataac

SEQ ID NO: 975 - DNA, 18 bp, synthetic construct
  source 1..18: mol_type = other DNA
aagtgtcaaaaagaataa

SEQ ID NO: 976 - DNA, 20 bp, synthetic construct
  source 1..20: mol_type = other DNA
aataagtgtcaaaaagaata

SEQ ID NO: 977 - DNA, 20 bp, synthetic construct
  source 1..20: mol_type = other DNA
aattaagtgtcaaaaagaat

SEQ ID NO: 978 - DNA, 20 bp, synthetic construct
  source 1..20: mol_type = other DNA
aatttaagtgtcaaaaagaa

SEQ ID NO: 979 - DNA, 19 bp, synthetic construct
  source 1..19: mol_type = other DNA
aatttaagtgtcaaaaaga

SEQ ID NO: 980 - DNA, 18 bp, synthetic construct
  source 1..18: mol_type = other DNA
aatttaagtgtcaaaaag

SEQ ID NO: 981 - DNA, 20 bp, synthetic construct
  source 1..20: mol_type = other DNA
aataatttaagtgtcaaaaa

SEQ ID NO: 982 - DNA, 20 bp, synthetic construct
  source 1..20: mol_type = other DNA
aagtaatttaagtgtcaaaa

SEQ ID NO: 983 - DNA, 20 bp, synthetic construct
  source 1..20: mol_type = other DNA
aatgtaatttaagtgtcaaa

SEQ ID NO: 984 - DNA, 20 bp, synthetic construct
  source 1..20: mol_type = other DNA
aattgtaatttaagtgtcaa

SEQ ID NO: 985 - DNA, 20 bp, synthetic construct
  source 1..20: mol_type = other DNA
aagttgtaatttaagtgtca

SEQ ID NO: 986 - DNA, 20 bp, synthetic construct
  source 1..20: mol_type = other DNA
aatgttgtaatttaagtgtc

SEQ ID NO: 987 - DNA, 20 bp, synthetic construct
  source 1..20: mol_type = other DNA
aattgttgtaatttaagtgt

SEQ ID NO: 988 - DNA, 19 bp, synthetic construct
  source 1..19: mol_type = other DNA
aattgttgtaatttaagtg

SEQ ID NO: 989 - DNA, 18 bp, synthetic construct
  source 1..18: mol_type = other DNA
aattgttgtaatttaagt

SEQ ID NO: 990 - DNA, 18 bp, synthetic construct
  source 1..18: mol_type = other DNA
aaattgttgtaatttaag

SEQ ID NO: 991 - DNA, 18 bp, synthetic construct
  source 1..18: mol_type = other DNA
aaaattgttgtaatttaa

SEQ ID NO: 992 - DNA, 20 bp, synthetic construct
  source 1..20: mol_type = other DNA
aacaaaattgttgtaattta

SEQ ID NO: 993 - DNA, 20 bp, synthetic construct
  source 1..20: mol_type = other DNA
aaccaaaattgttgtaattt

SEQ ID NO: 994 - DNA, 20 bp, synthetic construct
  source 1..20: mol_type = other DNA
aagccaaaattgttgtaatt

SEQ ID NO: 995 - DNA, 20 bp, synthetic construct
  source 1..20: mol_type = other DNA
aaggccaaaattgttgtaat

SEQ ID NO: 996 - DNA, 19 bp, synthetic construct
  source 1..19: mol_type = other DNA
aaggccaaaattgttgtaa

SEQ ID NO: 997 - DNA, 20 bp, synthetic construct
  source 1..20: mol_type = other DNA
aacaggccaaaattgttgta

SEQ ID NO: 998 - DNA, 19 bp, synthetic construct
  source 1..19: mol_type = other DNA
aacaggccaaaattgttgt

SEQ ID NO: 999 - DNA, 20 bp, synthetic construct
  source 1..20: mol_type = other DNA
aacacaggccaaaattgttg

SEQ ID NO: 1000 - DNA, 20 bp, synthetic construct
  source 1..20: mol_type = other DNA
aaccacaggccaaaattgtt

SEQ ID NO: 1001 - DNA, 20 bp, synthetic construct
  source 1..20: mol_type = other DNA
aatccacaggccaaaattgt

SEQ ID NO: 1002 - DNA, 20 bp, synthetic construct
  source 1..20: mol_type = other DNA
aagtccacaggccaaaattg

SEQ ID NO: 1003 - DNA, 19 bp, synthetic construct
  source 1..19: mol_type = other DNA
aagtccacaggccaaaatt

SEQ ID NO: 1004 - DNA, 20 bp, synthetic construct
  source 1..20: mol_type = other DNA
aagagtccacaggccaaaat

SEQ ID NO: 1005 - DNA, 19 bp, synthetic construct
  source 1..19: mol_type = other DNA
aagagtccacaggccaaaa

SEQ ID NO: 1006 - DNA, 20 bp, synthetic construct
  source 1..20: mol_type = other DNA
aatagagtccacaggccaaa

SEQ ID NO: 1007 - DNA, 19 bp, synthetic construct
  source 1..19: mol_type = other DNA
aatagagtccacaggccaa

SEQ ID NO: 1008 - DNA, 18 bp, synthetic construct
  source 1..18: mol_type = other DNA
aatagagtccacaggcca

SEQ ID NO: 1009 - DNA, 18 bp, synthetic construct
  source 1..18: mol_type = other DNA
aaatagagtccacaggcc

SEQ ID NO: 1010 - DNA, 18 bp, synthetic construct
  source 1..18: mol_type = other DNA
aaaatagagtccacaggc

SEQ ID NO: 1011 - DNA, 20 bp, synthetic construct
  source 1..20: mol_type = other DNA
aacttcacagcgggaactta

SEQ ID NO: 1012 - DNA, 20 bp, synthetic construct
  source 1..20: mol_type = other DNA
aatcttcacagcgggaactt

SEQ ID NO: 1013 - DNA, 20 bp, synthetic construct
  source 1..20: mol_type = other DNA
aactcttcacagcgggaact

SEQ ID NO: 1014 - DNA, 20 bp, synthetic construct
  source 1..20: mol_type = other DNA
aacctcttcacagcgggaac

SEQ ID NO: 1015 - DNA, 20 bp, synthetic construct
  source 1..20: mol_type = other DNA
aatcctcttcacagcgggaa

SEQ ID NO: 1016 - DNA, 20 bp, synthetic construct
  source 1..20: mol_type = other DNA
aattcctcttcacagcggga

SEQ ID NO: 1017 - DNA, 20 bp, synthetic construct
  source 1..20: mol_type = other DNA
aatttcctcttcacagcggg

SEQ ID NO: 1018 - DNA, 20 bp, synthetic construct
  source 1..20: mol_type = other DNA
aactttcctcttcacagcgg

SEQ ID NO: 1019 - DNA, 20 bp, synthetic construct
  source 1..20: mol_type = other DNA
aagctttcctcttcacagcg

SEQ ID NO: 1020 - DNA, 20 bp, synthetic construct
  source 1..20: mol_type = other DNA
aaggctttcctcttcacagc

SEQ ID NO: 1021 - DNA, 19 bp, synthetic construct
  source 1..19: mol_type = other DNA
aaggctttcctcttcacag

SEQ ID NO: 1022 - DNA, 18 bp, synthetic construct
  source 1..18: mol_type = other DNA
aaggctttcctcttcaca

SEQ ID NO: 1023 - DNA, 20 bp, synthetic construct
  source 1..20: mol_type = other DNA
aagaaggctttcctcttcac

SEQ ID NO: 1024 - DNA, 19 bp, synthetic construct
  source 1..19: mol_type = other DNA
aagaaggctttcctcttca

SEQ ID NO: 1025 - DNA, 20 bp, synthetic construct
  source 1..20: mol_type = other DNA
aatagaaggctttcctcttc

SEQ ID NO: 1026 - DNA, 20 bp, synthetic construct
  source 1..20: mol_type = other DNA
aactagaaggctttcctctt

SEQ ID NO: 1027 - DNA, 20 bp, synthetic construct
  source 1..20: mol_type = other DNA
aagctagaaggctttcctct

SEQ ID NO: 1028 - DNA, 20 bp, synthetic construct
  source 1..20: mol_type = other DNA
aaggctagaaggctttcctc

SEQ ID NO: 1029 - DNA, 20 bp, synthetic construct
  source 1..20: mol_type = other DNA
aagggctagaaggctttcct

SEQ ID NO: 1030 - DNA, 20 bp, synthetic construct
  source 1..20: mol_type = other DNA
aacgggctagaaggctttcc

SEQ ID NO: 1031 - DNA, 20 bp, synthetic construct
  source 1..20: mol_type = other DNA
aatcgggctagaaggctttc

SEQ ID NO: 1032 - DNA, 20 bp, synthetic construct
  source 1..20: mol_type = other DNA
aactcgggctagaaggcttt

SEQ ID NO: 1033 - DNA, 20 bp, synthetic construct
  source 1..20: mol_type = other DNA
aacctcgggctagaaggctt

SEQ ID NO: 1034 - DNA, 19 bp, synthetic construct
  source 1..19: mol_type = other DNA
aacctcgggctagaaggct

SEQ ID NO: 1035 - DNA, 20 bp, synthetic construct
  source 1..20: mol_type = other DNA
aagacctcgggctagaaggc

SEQ ID NO: 1036 - DNA, 20 bp, synthetic construct
  source 1..20: mol_type = other DNA
aacgacctcgggctagaagg

SEQ ID NO: 1037 - DNA, 20 bp, synthetic construct
  source 1..20: mol_type = other DNA
aatcgacctcgggctagaag

SEQ ID NO: 1038 - DNA, 19 bp, synthetic construct
  source 1..19: mol_type = other DNA
aatcgacctcgggctagaa

SEQ ID NO: 1039 - DNA, 20 bp, synthetic construct
  source 1..20: mol_type = other DNA
aagatcgacctcgggctaga

SEQ ID NO: 1040 - DNA, 19 bp, synthetic construct
  source 1..19: mol_type = other DNA
aagatcgacctcgggctag

SEQ ID NO: 1041 - DNA, 20 bp, synthetic construct
  source 1..20: mol_type = other DNA
aatagatcgacctcgggcta

SEQ ID NO: 1042 - DNA, 20 bp, synthetic construct
  source 1..20: mol_type = other DNA
aactagatcgacctcgggct

SEQ ID NO: 1043 - DNA, 19 bp, synthetic construct
  source 1..19: mol_type = other DNA
aactagatcgacctcgggc

SEQ ID NO: 1044 - DNA, 20 bp, synthetic construct
  source 1..20: mol_type = other DNA
aacactagatcgacctcggg

SEQ ID NO: 1045 - DNA, 20 bp, synthetic construct
  source 1..20: mol_type = other DNA
aagcactagatcgacctcgg

SEQ ID NO: 1046 - DNA, 19 bp, synthetic construct
  source 1..19: mol_type = other DNA
aagcactagatcgacctcg

SEQ ID NO: 1047 - DNA, 20 bp, synthetic construct
  source 1..20: mol_type = other DNA
aagagcactagatcgacctc

SEQ ID NO: 1048 - DNA, 20 bp, synthetic construct
  source 1..20: mol_type = other DNA
aatgagcactagatcgacct

SEQ ID NO: 1049 - DNA, 20 bp, synthetic construct
  source 1..20: mol_type = other DNA
aactgagcactagatcgacc

SEQ ID NO: 1050 - DNA, 20 bp, synthetic construct
  source 1..20: mol_type = other DNA
aatctgagcactagatcgac

SEQ ID NO: 1051 - DNA, 20 bp, synthetic construct
  source 1..20: mol_type = other DNA
aattctgagcactagatcga

SEQ ID NO: 1052 - DNA, 20 bp, synthetic construct
  source 1..20: mol_type = other DNA
aagttctgagcactagatcg

SEQ ID NO: 1053 - DNA, 20 bp, synthetic construct
  source 1..20: mol_type = other DNA
aatgttctgagcactagatc

SEQ ID NO: 1054 - DNA, 20 bp, synthetic construct
  source 1..20: mol_type = other DNA
aattgttctgagcactagat

SEQ ID NO: 1055 - DNA, 20 bp, synthetic construct
  source 1..20: mol_type = other DNA
aacttgttctgagcactaga

SEQ ID NO: 1056 - DNA, 20 bp, synthetic construct
  source 1..20: mol_type = other DNA
aagcttgttctgagcactag

SEQ ID NO: 1057 - DNA, 20 bp, synthetic construct
  source 1..20: mol_type = other DNA
aatgcttgttctgagcacta

SEQ ID NO: 1058 - DNA, 20 bp, synthetic construct
  source 1..20: mol_type = other DNA
aactgcttgttctgagcact

SEQ ID NO: 1059 - DNA, 20 bp, synthetic construct
  source 1..20: mol_type = other DNA
aacctgcttgttctgagcac

SEQ ID NO: 1060 - DNA, 19 bp, synthetic construct
  source 1..19: mol_type = other DNA
aacctgcttgttctgagca

SEQ ID NO: 1061 - DNA, 20 bp, synthetic construct
  source 1..20: mol_type = other DNA
aacacctgcttgttctgagc

SEQ ID NO: 1062 - DNA, 20 bp, synthetic construct
  source 1..20: mol_type = other DNA
aaccacctgcttgttctgag

SEQ ID NO: 1063 - DNA, 20 bp, synthetic construct
  source 1..20: mol_type = other DNA
aatccacctgcttgttctga

SEQ ID NO: 1064 - DNA, 20 bp, synthetic construct
  source 1..20: mol_type = other DNA
aagtccacctgcttgttctg

SEQ ID NO: 1065 - DNA, 20 bp, synthetic construct
  source 1..20: mol_type = other DNA
aacgtccacctgcttgttct

SEQ ID NO: 1066 - DNA, 20 bp, synthetic construct
  source 1..20: mol_type = other DNA
aatcgtccacctgcttgttc

SEQ ID NO: 1067 - DNA, 20 bp, synthetic construct
  source 1..20: mol_type = other DNA
aactcgtccacctgcttgtt

SEQ ID NO: 1068 - DNA, 20 bp, synthetic construct
  source 1..20: mol_type = other DNA
aatctcgtccacctgcttgt

SEQ ID NO: 1069 - DNA, 20 bp, synthetic construct
  source 1..20: mol_type = other DNA
aattctcgtccacctgcttg

SEQ ID NO: 1070 - DNA, 19 bp, synthetic construct
  source 1..19: mol_type = other DNA
aattctcgtccacctgctt

SEQ ID NO: 1071 - DNA, 18 bp, synthetic construct
  source 1..18: mol_type = other DNA
aattctcgtccacctgct

SEQ ID NO: 1072 - DNA, 20 bp, synthetic construct
  source 1..20: mol_type = other DNA
aagaattctcgtccacctgc

SEQ ID NO: 1073 - DNA, 19 bp, synthetic construct
  source 1..19: mol_type = other DNA
aagaattctcgtccacctg

SEQ ID NO: 1074 - DNA, 18 bp, synthetic construct
  source 1..18: mol_type = other DNA
aagaattctcgtccacct

SEQ ID NO: 1075 - DNA, 18 bp, synthetic construct
  source 1..18: mol_type = other DNA
aaagaattctcgtccacc

SEQ ID NO: 1076 - DNA, 20 bp, synthetic construct
  source 1..20: mol_type = other DNA
aacaaagaattctcgtccac

SEQ ID NO: 1077 - DNA, 20 bp, synthetic construct
  source 1..20: mol_type = other DNA
aatcaaagaattctcgtcca

SEQ ID NO: 1078 - DNA, 19 bp, synthetic construct
  source 1..19: mol_type = other DNA
aatcaaagaattctcgtcc

SEQ ID NO: 1079 - DNA, 18 bp, synthetic construct
  source 1..18: mol_type = other DNA
aatcaaagaattctcgtc

SEQ ID NO: 1080 - DNA, 18 bp, synthetic construct
  source 1..18: mol_type = other DNA
aaatcaaagaattctcgt

SEQ ID NO: 1081 - DNA, 20 bp, synthetic construct
  source 1..20: mol_type = other DNA
aagaaatcaaagaattctcg

SEQ ID NO: 1082 - DNA, 20 bp, synthetic construct
  source 1..20: mol_type = other DNA
aatgaaatcaaagaattctc

SEQ ID NO: 1083 - DNA, 20 bp, synthetic construct
  source 1..20: mol_type = other DNA
aattgaaatcaaagaattct

SEQ ID NO: 1084 - DNA, 20 bp, synthetic construct
  source 1..20: mol_type = other DNA
aagttgaaatcaaagaattc

SEQ ID NO: 1085 - DNA, 20 bp, synthetic construct
  source 1..20: mol_type = other DNA
aaggttgaaatcaaagaatt

SEQ ID NO: 1086 - DNA, 20 bp, synthetic construct
  source 1..20: mol_type = other DNA
aatggttgaaatcaaagaat

SEQ ID NO: 1087 - DNA, 20 bp, synthetic construct
  source 1..20: mol_type = other DNA
aattggttgaaatcaaagaa

SEQ ID NO: 1088 - DNA, 20 bp, synthetic construct
  source 1..20: mol_type = other DNA
aatttggttgaaatcaaaga

SEQ ID NO: 1089 - DNA, 20 bp, synthetic construct
  source 1..20: mol_type = other DNA
aactttggttgaaatcaaag

SEQ ID NO: 1090 - DNA, 20 bp, synthetic construct
  source 1..20: mol_type = other DNA
aatctttggttgaaatcaaa

SEQ ID NO: 1091 - DNA, 20 bp, synthetic construct
  source 1..20: mol_type = other DNA
aattctttggttgaaatcaa

SEQ ID NO: 1092 - DNA, 20 bp, synthetic construct
  source 1..20: mol_type = other DNA
aacttctttggttgaaatca

SEQ ID NO: 1093 - DNA, 20 bp, synthetic construct
  source 1..20: mol_type = other DNA
aatcttctttggttgaaatc

SEQ ID NO: 1094 - DNA, 20 bp, synthetic construct
  source 1..20: mol_type = other DNA
aactcttctttggttgaaat

SEQ ID NO: 1095 - DNA, 20 bp, synthetic construct
  source 1..20: mol_type = other DNA
aagctcttctttggttgaaa

SEQ ID NO: 1096 - DNA, 20 bp, synthetic construct
  source 1..20: mol_type = other DNA
aaggctcttctttggttgaa

SEQ ID NO: 1097 - DNA, 19 bp, synthetic construct
  source 1..19: mol_type = other DNA
aaggctcttctttggttga

SEQ ID NO: 1098 - DNA, 20 bp, synthetic construct
  source 1..20: mol_type = other DNA
aagaggctcttctttggttg

SEQ ID NO: 1099 - DNA, 20 bp, synthetic construct
  source 1..20: mol_type = other DNA
aaggaggctcttctttggtt

SEQ ID NO: 1100 - DNA, 20 bp, synthetic construct
  source 1..20: mol_type = other DNA
aatggaggctcttctttggt

SEQ ID NO: 1101 - DNA, 20 bp, synthetic construct
  source 1..20: mol_type = other DNA
aactggaggctcttctttgg

SEQ ID NO: 1102 - DNA, 19 bp, synthetic construct
  source 1..19: mol_type = other DNA
aactggaggctcttctttg

SEQ ID NO: 1103 - DNA, 18 bp, synthetic construct
  source 1..18: mol_type = other DNA
aactggaggctcttcttt

SEQ ID NO: 1104 - DNA, 20 bp, synthetic construct
  source 1..20: mol_type = other DNA
aagaactggaggctcttctt

SEQ ID NO: 1105 - DNA, 19 bp, synthetic construct
  source 1..19: mol_type = other DNA
aagaactggaggctcttct

SEQ ID NO: 1106 - DNA, 18 bp, synthetic construct
  source 1..18: mol_type = other DNA
aagaactggaggctcttc

SEQ ID NO: 1107 - DNA, 20 bp, synthetic construct
  source 1..20: mol_type = other DNA
aacaagaactggaggctctt

SEQ ID NO: 1108 - DNA, 20 bp, synthetic construct
  source 1..20: mol_type = other DNA
aatcaagaactggaggctct

SEQ ID NO: 1109 - DNA, 20 bp, synthetic construct
  source 1..20: mol_type = other DNA
aattcaagaactggaggctc

SEQ ID NO: 1110 - DNA, 20 bp, synthetic construct
  source 1..20: mol_type = other DNA
aatttcaagaactggaggct

SEQ ID NO: 1111 - DNA, 20 bp, synthetic construct
  source 1..20: mol_type = other DNA
aactttcaagaactggaggc

SEQ ID NO: 1112 - DNA, 20 bp, synthetic construct
  source 1..20: mol_type = other DNA
aacctttcaagaactggagg

SEQ ID NO: 1113 - DNA, 20 bp, synthetic construct
  source 1..20: mol_type = other DNA
aaccctttcaagaactggag

SEQ ID NO: 1114 - DNA, 20 bp, synthetic construct
  source 1..20: mol_type = other DNA
aatccctttcaagaactgga

SEQ ID NO: 1115 - DNA, 20 bp, synthetic construct
  source 1..20: mol_type = other DNA
aactccctttcaagaactgg

SEQ ID NO: 1116 - DNA, 20 bp, synthetic construct
  source 1..20: mol_type = other DNA
aacctccctttcaagaactg

SEQ ID NO: 1117 - DNA, 20 bp, synthetic construct
  source 1..20: mol_type = other DNA
aagcctccctttcaagaact

SEQ ID NO: 1118 - DNA, 19 bp, synthetic construct
  source 1..19: mol_type = other DNA
aagcctccctttcaagaac

SEQ ID NO: 1119 - DNA, 20 bp, synthetic construct
  source 1..20: mol_type = other DNA
aagagcctccctttcaagaa

SEQ ID NO: 1120 - DNA, 20 bp, synthetic construct
  source 1..20: mol_type = other DNA
aaggagcctccctttcaaga

SEQ ID NO: 1121 - DNA, 20 bp, synthetic construct
  source 1..20: mol_type = other DNA
aacggagcctccctttcaag

SEQ ID NO: 1122 - DNA, 19 bp, synthetic construct
  source 1..19: mol_type = other DNA
aacggagcctccctttcaa

SEQ ID NO: 1123 - DNA, 18 bp, synthetic construct
  source 1..18: mol_type = other DNA
aacggagcctccctttca

SEQ ID NO: 1124 - DNA, 18 bp, synthetic construct
  source 1..18: mol_type = other DNA
aaacggagcctccctttc

SEQ ID NO: 1125 - DNA, 18 bp, synthetic construct
  source 1..18: mol_type = other DNA
aaaacggagcctcccttt

SEQ ID NO: 1126 - DNA, 18 bp, synthetic construct
  source 1..18: mol_type = other DNA
aaaaacggagcctccctt

SEQ ID NO: 1127 - DNA, 20 bp, synthetic construct
  source 1..20: mol_type = other DNA
aacaaaaacggagcctccct

SEQ ID NO: 1128 - DNA, 20 bp, synthetic construct
  source 1..20: mol_type = other DNA
aaccaaaaacggagcctccc

SEQ ID NO: 1129 - DNA, 20 bp, synthetic construct
  source 1..20: mol_type = other DNA
aatccaaaaacggagcctcc

SEQ ID NO: 1130 - DNA, 20 bp, synthetic construct
  source 1..20: mol_type = other DNA
aactccaaaaacggagcctc

SEQ ID NO: 1131 - DNA, 20 bp, synthetic construct
  source 1..20: mol_type = other DNA
aacctccaaaaacggagcct

SEQ ID NO: 1132 - DNA, 20 bp, synthetic construct
  source 1..20: mol_type = other DNA
aaccctccaaaaacggagcc

SEQ ID NO: 1133 - DNA, 20 bp, synthetic construct
  source 1..20: mol_type = other DNA
aagccctccaaaaacggagc

SEQ ID NO: 1134 - DNA, 20 bp, synthetic construct
  source 1..20: mol_type = other DNA
aaggccctccaaaaacggag

SEQ ID NO: 1135 - DNA, 20 bp, synthetic construct
  source 1..20: mol_type = other DNA
aagggccctccaaaaacgga

SEQ ID NO: 1136 - DNA, 20 bp, synthetic construct
  source 1..20: mol_type = other DNA
aaggggccctccaaaaacgg

SEQ ID NO: 1137 - DNA, 19 bp, synthetic construct
  source 1..19: mol_type = other DNA
aaggggccctccaaaaacg

SEQ ID NO: 1138 - DNA, 18 bp, synthetic construct
  source 1..18: mol_type = other DNA
aaggggccctccaaaaac

SEQ ID NO: 1139 - DNA, 20 bp, synthetic construct
  source 1..20: mol_type = other DNA
aacaaggggccctccaaaaa

SEQ ID NO: 1140 - DNA, 20 bp, synthetic construct
  source 1..20: mol_type = other DNA
aaccaaggggccctccaaaa

SEQ ID NO: 1141 - DNA, 20 bp, synthetic construct
  source 1..20: mol_type = other DNA
aagccaaggggccctccaaa

SEQ ID NO: 1142 - DNA, 19 bp, synthetic construct
  source 1..19: mol_type = other DNA
aagccaaggggccctccaa

SEQ ID NO: 1143 - DNA, 20 bp, synthetic construct
  source 1..20: mol_type = other DNA
aagagccaaggggccctcca

SEQ ID NO: 1144 - DNA, 20 bp, synthetic construct
  source 1..20: mol_type = other DNA
aatgagccaaggggccctcc

SEQ ID NO: 1145 - DNA, 20 bp, synthetic construct
  source 1..20: mol_type = other DNA
aactgagccaaggggccctc

SEQ ID NO: 1146 - DNA, 19 bp, synthetic construct
  source 1..19: mol_type = other DNA
aactgagccaaggggccct

SEQ ID NO: 1147 - DNA, 20 bp, synthetic construct
  source 1..20: mol_type = other DNA
aagactgagccaaggggccc

SEQ ID NO: 1148 - DNA, 20 bp, synthetic construct
  source 1..20: mol_type = other DNA
aatgactgagccaaggggcc

SEQ ID NO: 1149 - DNA, 20 bp, synthetic construct
  source 1..20: mol_type = other DNA
aactgactgagccaaggggc

SEQ ID NO: 1150 - DNA, 20 bp, synthetic construct
  source 1..20: mol_type = other DNA
aatctgactgagccaagggg

SEQ ID NO: 1151 - DNA, 20 bp, synthetic construct
  source 1..20: mol_type = other DNA
aattctgactgagccaaggg

SEQ ID NO: 1152 - DNA, 20 bp, synthetic construct
  source 1..20: mol_type = other DNA
aagttctgactgagccaagg

SEQ ID NO: 1153 - DNA, 19 bp, synthetic construct
  source 1..19: mol_type = other DNA
aagttctgactgagccaag

SEQ ID NO: 1154 - DNA, 18 bp, synthetic construct
  source 1..18: mol_type = other DNA
aagttctgactgagccaa

SEQ ID NO: 1155 - DNA, 20 bp, synthetic construct
  source 1..20: mol_type = other DNA
aacaagttctgactgagcca

SEQ ID NO: 1156 - DNA, 20 bp, synthetic construct
  source 1..20: mol_type = other DNA
aaccaagttctgactgagcc

SEQ ID NO: 1157 - DNA, 20 bp, synthetic construct
  source 1..20: mol_type = other DNA
aatccaagttctgactgagc

SEQ ID NO: 1158 - DNA, 20 bp, synthetic construct
  source 1..20: mol_type = other DNA
aactccaagttctgactgag

SEQ ID NO: 1159 - DNA, 20 bp, synthetic construct
  source 1..20: mol_type = other DNA
aacctccaagttctgactga

SEQ ID NO: 1160 - DNA, 19 bp, synthetic construct
  source 1..19: mol_type = other DNA
aacctccaagttctgactg

SEQ ID NO: 1161 - DNA, 20 bp, synthetic construct
  source 1..20: mol_type = other DNA
aacacctccaagttctgact

SEQ ID NO: 1162 - DNA, 20 bp, synthetic construct
  source 1..20: mol_type = other DNA
aaccacctccaagttctgac

SEQ ID NO: 1163 - DNA, 20 bp, synthetic construct
  source 1..20: mol_type = other DNA
aatccacctccaagttctga

SEQ ID NO: 1164 - DNA, 20 bp, synthetic construct
  source 1..20: mol_type = other DNA
aagtccacctccaagttctg

SEQ ID NO: 1165 - DNA, 20 bp, synthetic construct
  source 1..20: mol_type = other DNA
aatgtccacctccaagttct

SEQ ID NO: 1166 - DNA, 19 bp, synthetic construct
  source 1..19: mol_type = other DNA
aatgtccacctccaagttc

SEQ ID NO: 1167 - DNA, 20 bp, synthetic construct
  source 1..20: mol_type = other DNA
aacatgtccacctccaagtt

SEQ ID NO: 1168 - DNA, 20 bp, synthetic construct
  source 1..20: mol_type = other DNA
aagcatgtccacctccaagt

SEQ ID NO: 1169 - DNA, 19 bp, synthetic construct
  source 1..19: mol_type = other DNA
aagcatgtccacctccaag

SEQ ID NO: 1170 - DNA, 20 bp, synthetic construct
  source 1..20: mol_type = other DNA
aacagcatgtccacctccaa

SEQ ID NO: 1171 - DNA, 20 bp, synthetic construct
  source 1..20: mol_type = other DNA
aatcagcatgtccacctcca

SEQ ID NO: 1172 - DNA, 20 bp, synthetic construct
  source 1..20: mol_type = other DNA
aactcagcatgtccacctcc

SEQ ID NO: 1173 - DNA, 19 bp, synthetic construct
  source 1..19: mol_type = other DNA
aactcagcatgtccacctc

SEQ ID NO: 1174 - DNA, 18 bp, synthetic construct
  source 1..18: mol_type = other DNA
aactcagcatgtccacct

SEQ ID NO: 1175 - DNA, 20 bp, synthetic construct
  source 1..20: mol_type = other DNA
aacaactcagcatgtccacc

SEQ ID NO: 1176 - DNA, 20 bp, synthetic construct
  source 1..20: mol_type = other DNA
aagcaactcagcatgtccac

SEQ ID NO: 1177 - DNA, 20 bp, synthetic construct
  source 1..20: mol_type = other DNA
aaggcaactcagcatgtcca

SEQ ID NO: 1178 - DNA, 20 bp, synthetic construct
  source 1..20: mol_type = other DNA
aacggcaactcagcatgtcc

SEQ ID NO: 1179 - DNA, 20 bp, synthetic construct
  source 1..20: mol_type = other DNA
aagcggcaactcagcatgtc

SEQ ID NO: 1180 - DNA, 20 bp, synthetic construct
  source 1..20: mol_type = other DNA
aatgcggcaactcagcatgt

SEQ ID NO: 1181 - DNA, 20 bp, synthetic construct
  source 1..20: mol_type = other DNA
aactgcggcaactcagcatg

SEQ ID NO: 1182 - DNA, 20 bp, synthetic construct
  source 1..20: mol_type = other DNA
aagctgcggcaactcagcat

SEQ ID NO: 1183 - DNA, 19 bp, synthetic construct
  source 1..19: mol_type = other DNA
aagctgcggcaactcagca

SEQ ID NO: 1184 - DNA, 20 bp, synthetic construct
  source 1..20: mol_type = other DNA
aacagctgcggcaactcagc

SEQ ID NO: 1185 - DNA, 20 bp, synthetic construct
  source 1..20: mol_type = other DNA
aatcagctgcggcaactcag

SEQ ID NO: 1186 - DNA, 20 bp, synthetic construct
  source 1..20: mol_type = other DNA
aagtcagctgcggcaactca

SEQ ID NO: 1187 - DNA, 20 bp, synthetic construct
  source 1..20: mol_type = other DNA
aaggtcagctgcggcaactc

SEQ ID NO: 1188 - DNA, 19 bp, synthetic construct
  source 1..19: mol_type = other DNA
aaggtcagctgcggcaact

SEQ ID NO: 1189 - DNA, 18 bp, synthetic construct
  source 1..18: mol_type = other DNA
aaggtcagctgcggcaac

SEQ ID NO: 1190 - DNA, 20 bp, synthetic construct
  source 1..20: mol_type = other DNA
aacaaggtcagctgcggcaa

SEQ ID NO: 1191 - DNA, 19 bp, synthetic construct
  source 1..19: mol_type = other DNA
aacaaggtcagctgcggca

SEQ ID NO: 1192 - DNA, 20 bp, synthetic construct
  source 1..20: mol_type = other DNA
aagacaaggtcagctgcggc

SEQ ID NO: 1193 - DNA, 19 bp, synthetic construct
  source 1..19: mol_type = other DNA
aagacaaggtcagctgcgg

SEQ ID NO: 1194 - DNA, 20 bp, synthetic construct
  source 1..20: mol_type = other DNA
aacagacaaggtcagctgcg

SEQ ID NO: 1195 - DNA, 19 bp, synthetic construct
  source 1..19: mol_type = other DNA
aacagacaaggtcagctgc

SEQ ID NO: 1196 - DNA, 20 bp, synthetic construct
  source 1..20: mol_type = other DNA
aacacagacaaggtcagctg

SEQ ID NO: 1197 - DNA, 20 bp, synthetic construct
  source 1..20: mol_type = other DNA
aagcacagacaaggtcagct

SEQ ID NO: 1198 - DNA, 20 bp, synthetic construct
  source 1..20: mol_type = other DNA
aaggcacagacaaggtcagc

SEQ ID NO: 1199 - DNA, 19 bp, synthetic construct
  source 1..19: mol_type = other DNA
aaggcacagacaaggtcag

SEQ ID NO: 1200 - DNA, 20 bp, synthetic construct
  source 1..20: mol_type = other DNA
aacaggcacagacaaggtca

SEQ ID NO: 1201 - DNA, 19 bp, synthetic construct
  source 1..19: mol_type = other DNA
aacaggcacagacaaggtc

SEQ ID NO: 1202 - DNA, 20 bp, synthetic construct
  source 1..20: mol_type = other DNA
aacacaggcacagacaaggt

SEQ ID NO: 1203 - DNA, 20 bp, synthetic construct
  source 1..20: mol_type = other DNA
aaccacaggcacagacaagg

SEQ ID NO: 1204 - DNA, 20 bp, synthetic construct
  source 1..20: mol_type = other DNA
aagccacaggcacagacaag

SEQ ID NO: 1205 - DNA, 19 bp, synthetic construct
  source 1..19: mol_type = other DNA
aagccacaggcacagacaa

SEQ ID NO: 1206 - DNA, 20 bp, synthetic construct
  source 1..20: mol_type = other DNA
aagagccacaggcacagaca

SEQ ID NO: 1207 - DNA, 20 bp, synthetic construct
  source 1..20: mol_type = other DNA
aaggagccacaggcacagac

SEQ ID NO: 1208 - DNA, 20 bp, synthetic construct
  source 1..20: mol_type = other DNA
aacggagccacaggcacaga

SEQ ID NO: 1209 - DNA, 20 bp, synthetic construct
  source 1..20: mol_type = other DNA
aaccggagccacaggcacag

SEQ ID NO: 1210 - DNA, 20 bp, synthetic construct
  source 1..20: mol_type = other DNA
aatccggagccacaggcaca

SEQ ID NO: 1211 - DNA, 20 bp, synthetic construct
  source 1..20: mol_type = other DNA
aattccggagccacaggcac

SEQ ID NO: 1212 - DNA, 20 bp, synthetic construct
  source 1..20: mol_type = other DNA
aacttccggagccacaggca

SEQ ID NO: 1213 - DNA, 19 bp, synthetic construct
  source 1..19: mol_type = other DNA
aacttccggagccacaggc

SEQ ID NO: 1214 - DNA, 20 bp, synthetic construct
  source 1..20: mol_type = other DNA
aagacttccggagccacagg

SEQ ID NO: 1215 - DNA, 19 bp, synthetic construct
  source 1..19: mol_type = other DNA
aagacttccggagccacag

SEQ ID NO: 1216 - DNA, 20 bp, synthetic construct
  source 1..20: mol_type = other DNA
aagagacttccggagccaca

SEQ ID NO: 1217 - DNA, 19 bp, synthetic construct
  source 1..19: mol_type = other DNA
aagagacttccggagccac

SEQ ID NO: 1218 - DNA, 20 bp, synthetic construct
  source 1..20: mol_type = other DNA
aagagagacttccggagcca

SEQ ID NO: 1219 - DNA, 20 bp, synthetic construct
  source 1..20: mol_type = other DNA
aaggagagacttccggagcc

SEQ ID NO: 1220 - DNA, 20 bp, synthetic construct
  source 1..20: mol_type = other DNA
aatggagagacttccggagc

SEQ ID NO: 1221 - DNA, 20 bp, synthetic construct
  source 1..20: mol_type = other DNA
aagtggagagacttccggag

SEQ ID NO: 1222 - DNA, 20 bp, synthetic construct
  source 1..20: mol_type = other DNA
aacgtggagagacttccgga

SEQ ID NO: 1223 - DNA, 20 bp, synthetic construct
  source 1..20: mol_type = other DNA
aaccgtggagagacttccgg

SEQ ID NO: 1224 - DNA, 20 bp, synthetic construct
  source 1..20: mol_type = other DNA
aagccgtggagagacttccg

SEQ ID NO: 1225 - DNA, 20 bp, synthetic construct
  source 1..20: mol_type = other DNA
aaggccgtggagagacttcc

SEQ ID NO: 1226 - DNA, 19 bp, synthetic construct
  source 1..19: mol_type = other DNA
aaggccgtggagagacttc

SEQ ID NO: 1227 - DNA, 20 bp, synthetic construct
  source 1..20: mol_type = other DNA
aacaggccgtggagagactt

SEQ ID NO: 1228 - DNA, 20 bp, synthetic construct
  source 1..20: mol_type = other DNA
aagcaggccgtggagagact

SEQ ID NO: 1229 - DNA, 20 bp, synthetic construct
  source 1..20: mol_type = other DNA
aaggcaggccgtggagagac

SEQ ID NO: 1230 - DNA, 20 bp, synthetic construct
  source 1..20: mol_type = other DNA
aagggcaggccgtggagaga

SEQ ID NO: 1231 - DNA, 19 bp, synthetic construct
  source 1..19: mol_type = other DNA
aagggcaggccgtggagag

SEQ ID NO: 1232 - DNA, 18 bp, synthetic construct
  source 1..18: mol_type = other DNA
aagggcaggccgtggaga

SEQ ID NO: 1233 - DNA, 20 bp, synthetic construct
  source 1..20: mol_type = other DNA
aacaagggcaggccgtggag

SEQ ID NO: 1234 - DNA, 20 bp, synthetic construct
  source 1..20: mol_type = other DNA
aatcaagggcaggccgtgga

SEQ ID NO: 1235 - DNA, 20 bp, synthetic construct
  source 1..20: mol_type = other DNA
aactcaagggcaggccgtgg

SEQ ID NO: 1236 - DNA, 19 bp, synthetic construct
  source 1..19: mol_type = other DNA
aactcaagggcaggccgtg

SEQ ID NO: 1237 - DNA, 20 bp, synthetic construct
  source 1..20: mol_type = other DNA
aagactcaagggcaggccgt

SEQ ID NO: 1238 - DNA, 19 bp, synthetic construct
  source 1..19: mol_type = other DNA
aagactcaagggcaggccg

SEQ ID NO: 1239 - DNA, 20 bp, synthetic construct
  source 1..20: mol_type = other DNA
aacagactcaagggcaggcc

SEQ ID NO: 1240 - DNA, 20 bp, synthetic construct
  source 1..20: mol_type = other DNA
aatcagactcaagggcaggc

SEQ ID NO: 1241 - DNA, 20 bp, synthetic construct
  source 1..20: mol_type = other DNA
aactcagactcaagggcagg

SEQ ID NO: 1242 - DNA, 20 bp, synthetic construct
  source 1..20: mol_type = other DNA
aacctcagactcaagggcag

SEQ ID NO: 1243 - DNA, 20 bp, synthetic construct
  source 1..20: mol_type = other DNA
aatcctcagactcaagggca

SEQ ID NO: 1244 - DNA, 20 bp, synthetic construct
  source 1..20: mol_type = other DNA
aattcctcagactcaagggc

SEQ ID NO: 1245 - DNA, 19 bp, synthetic construct
  source 1..19: mol_type = other DNA
aattcctcagactcaaggg

SEQ ID NO: 1246 - DNA, 18 bp, synthetic construct
  source 1..18: mol_type = other DNA
aattcctcagactcaagg

SEQ ID NO: 1247 - DNA, 20 bp, synthetic construct
  source 1..20: mol_type = other DNA
aacaattcctcagactcaag

SEQ ID NO: 1248 - DNA, 20 bp, synthetic construct
  source 1..20: mol_type = other DNA
aagcaattcctcagactcaa

SEQ ID NO: 1249 - DNA, 19 bp, synthetic construct
  source 1..19: mol_type = other DNA
aagcaattcctcagactca

SEQ ID NO: 1250 - DNA, 20 bp, synthetic construct
  source 1..20: mol_type = other DNA
aatagcaattcctcagactc

SEQ ID NO: 1251 - DNA, 20 bp, synthetic construct
  source 1..20: mol_type = other DNA
aactagcaattcctcagact

SEQ ID NO: 1252 - DNA, 19 bp, synthetic construct
  source 1..19: mol_type = other DNA
aactagcaattcctcagac

SEQ ID NO: 1253 - DNA, 18 bp, synthetic construct
  source 1..18: mol_type = other DNA
aactagcaattcctcaga

SEQ ID NO: 1254 - DNA, 20 bp, synthetic construct
  source 1..20: mol_type = other DNA
aataactagcaattcctcag

SEQ ID NO: 1255 - DNA, 20 bp, synthetic construct
  source 1..20: mol_type = other DNA
aattaactagcaattcctca

SEQ ID NO: 1256 - DNA, 20 bp, synthetic construct
  source 1..20: mol_type = other DNA
aatttaactagcaattcctc

SEQ ID NO: 1257 - DNA, 20 bp, synthetic construct
  source 1..20: mol_type = other DNA
aattttaactagcaattcct

SEQ ID NO: 1258 - DNA, 20 bp, synthetic construct
  source 1..20: mol_type = other DNA
aagttttaactagcaattcc

SEQ ID NO: 1259 - DNA, 20 bp, synthetic construct
  source 1..20: mol_type = other DNA
aacgttttaactagcaattc

SEQ ID NO: 1260 - DNA, 20 bp, synthetic construct
  source 1..20: mol_type = other DNA
aatactgagaccccaacccc

SEQ ID NO: 1261 - DNA, 19 bp, synthetic construct
  source 1..19: mol_type = other DNA
aatactgagaccccaaccc

SEQ ID NO: 1262 - DNA, 18 bp, synthetic construct
  source 1..18: mol_type = other DNA
aatactgagaccccaacc

SEQ ID NO: 1263 - DNA, 18 bp, synthetic construct
  source 1..18: mol_type = other DNA
aaatactgagaccccaac

SEQ ID NO: 1264 - DNA, 20 bp, synthetic construct
  source 1..20: mol_type = other DNA
aacaaatactgagaccccaa

SEQ ID NO: 1265 - DNA, 20 bp, synthetic construct
  source 1..20: mol_type = other DNA
aatcaaatactgagacccca

SEQ ID NO: 1266 - DNA, 20 bp, synthetic construct
  source 1..20: mol_type = other DNA
aactcaaatactgagacccc

SEQ ID NO: 1267 - DNA, 20 bp, synthetic construct
  source 1..20: mol_type = other DNA
aagctcaaatactgagaccc

SEQ ID NO: 1268 - DNA, 20 bp, synthetic construct
  source 1..20: mol_type = other DNA
aatgctcaaatactgagacc

SEQ ID NO: 1269 - DNA, 20 bp, synthetic construct
  source 1..20: mol_type = other DNA
aactgctcaaatactgagac

SEQ ID NO: 1270 - DNA, 20 bp, synthetic construct
  source 1..20: mol_type = other DNA
aatctgctcaaatactgaga

SEQ ID NO: 1271 - DNA, 19 bp, synthetic construct
  source 1..19: mol_type = other DNA
aatctgctcaaatactgag

SEQ ID NO: 1272 - DNA, 20 bp, synthetic construct
  source 1..20: mol_type = other DNA
aatatctgctcaaatactga

SEQ ID NO: 1273 - DNA, 19 bp, synthetic construct
  source 1..19: mol_type = other DNA
aatatctgctcaaatactg

SEQ ID NO: 1274 - DNA, 20 bp, synthetic construct
  source 1..20: mol_type = other DNA
aacatatctgctcaaatact

SEQ ID NO: 1275 - DNA, 20 bp, synthetic construct
  source 1..20: mol_type = other DNA
aatcatatctgctcaaatac

SEQ ID NO: 1276 - DNA, 19 bp, synthetic construct
  source 1..19: mol_type = other DNA
aatcatatctgctcaaata

SEQ ID NO: 1277 - DNA, 18 bp, synthetic construct
  source 1..18: mol_type = other DNA
aatcatatctgctcaaat

SEQ ID NO: 1278 - DNA, 20 bp, synthetic construct
  source 1..20: mol_type = other DNA
aataatcatatctgctcaaa

SEQ ID NO: 1279 - DNA, 20 bp, synthetic construct
  source 1..20: mol_type = other DNA
aactaatcatatctgctcaa

SEQ ID NO: 1280 - DNA, 20 bp, synthetic construct
  source 1..20: mol_type = other DNA
aatctaatcatatctgctca

SEQ ID NO: 1281 - DNA, 20 bp, synthetic construct
  source 1..20: mol_type = other DNA
aactctaatcatatctgctc

SEQ ID NO: 1282 - DNA, 20 bp, synthetic construct
  source 1..20: mol_type = other DNA
aacctctaatcatatctgct

SEQ ID NO: 1283 - DNA, 20 bp, synthetic construct
  source 1..20: mol_type = other DNA
aatcctctaatcatatctgc

SEQ ID NO: 1284 - DNA, 20 bp, synthetic construct
  source 1..20: mol_type = other DNA
aattcctctaatcatatctg

SEQ ID NO: 1285 - DNA, 20 bp, synthetic construct
  source 1..20: mol_type = other DNA
aacttcctctaatcatatct

SEQ ID NO: 1286 - DNA, 20 bp, synthetic construct
  source 1..20: mol_type = other DNA
aagcttcctctaatcatatc

SEQ ID NO: 1287 - DNA, 20 bp, synthetic construct
  source 1..20: mol_type = other DNA
aatgcttcctctaatcatat

SEQ ID NO: 1288 - DNA, 20 bp, synthetic construct
  source 1..20: mol_type = other DNA
aactgcttcctctaatcata

SEQ ID NO: 1289 - DNA, 20 bp, synthetic construct
  source 1..20: mol_type = other DNA
aacctgcttcctctaatcat

SEQ ID NO: 1290 - DNA, 20 bp, synthetic construct
  source 1..20: mol_type = other DNA
aatcctgcttcctctaatca

SEQ ID NO: 1291 - DNA, 20 bp, synthetic construct
  source 1..20: mol_type = other DNA
aactcctgcttcctctaatc

SEQ ID NO: 1292 - DNA, 20 bp, synthetic construct
  source 1..20: mol_type = other DNA
aatctcctgcttcctctaat

SEQ ID NO: 1293 - DNA, 19 bp, synthetic construct
  source 1..19: mol_type = other DNA
aatctcctgcttcctctaa

SEQ ID NO: 1294 - DNA, 18 bp, synthetic construct
  source 1..18: mol_type = other DNA
aatctcctgcttcctcta

SEQ ID NO: 1295 - DNA, 18 bp, synthetic construct
  source 1..18: mol_type = other DNA
aaatctcctgcttcctct

SEQ ID NO: 1296 - DNA, 18 bp, synthetic construct
  source 1..18: mol_type = other DNA
aaaatctcctgcttcctc

SEQ ID NO: 1297 - DNA, 20 bp, synthetic construct
  source 1..20: mol_type = other DNA
aataaaatctcctgcttcct

SEQ ID NO: 1298 - DNA, 20 bp, synthetic construct
  source 1..20: mol_type = other DNA
aactaaaatctcctgcttcc

SEQ ID NO: 1299 - DNA, 19 bp, synthetic construct
  source 1..19: mol_type = other DNA
aactaaaatctcctgcttc

SEQ ID NO: 1300 - DNA, 20 bp, synthetic construct
  source 1..20: mol_type = other DNA
aatactaaaatctcctgctt

SEQ ID NO: 1301 - DNA, 19 bp, synthetic construct
  source 1..19: mol_type = other DNA
aatactaaaatctcctgct

SEQ ID NO: 1302 - DNA, 20 bp, synthetic construct
  source 1..20: mol_type = other DNA
aacatactaaaatctcctgc

SEQ ID NO: 1303 - DNA, 19 bp, synthetic construct
  source 1..19: mol_type = other DNA
aacatactaaaatctcctg

SEQ ID NO: 1304 - DNA, 18 bp, synthetic construct
  source 1..18: mol_type = other DNA
aacatactaaaatctcct

SEQ ID NO: 1305 - DNA, 18 bp, synthetic construct
  source 1..18: mol_type = other DNA
aaacatactaaaatctcc

SEQ ID NO: 1306 - DNA, 18 bp, synthetic construct
  source 1..18: mol_type = other DNA
aaaacatactaaaatctc

SEQ ID NO: 1307 - DNA, 20 bp, synthetic construct
  source 1..20: mol_type = other DNA
aacaaaacatactaaaatct

SEQ ID NO: 1308 - DNA, 20 bp, synthetic construct
  source 1..20: mol_type = other DNA
aatcaaaacatactaaaatc

SEQ ID NO: 1309 - DNA, 19 bp, synthetic construct
  source 1..19: mol_type = other DNA
aatcaaaacatactaaaat

SEQ ID NO: 1310 - DNA, 20 bp, synthetic construct
  source 1..20: mol_type = other DNA
aacatcaaaacatactaaaa

SEQ ID NO: 1311 - DNA, 19 bp, synthetic construct
  source 1..19: mol_type = other DNA
aacatcaaaacatactaaa

SEQ ID NO: 1312 - DNA, 20 bp, synthetic construct
  source 1..20: mol_type = other DNA
aatacatcaaaacatactaa

SEQ ID NO: 1313 - DNA, 19 bp, synthetic construct
  source 1..19: mol_type = other DNA
attacatcaaaacatacta

SEQ ID NO: 1314 - DNA, 19 bp, synthetic construct
  source 1..19: mol_type = other DNA
atttacatcaaaacatact

SEQ ID NO: 1315 - DNA, 20 bp, synthetic construct
  source 1..20: mol_type = other DNA
aactttacatcaaaacatac

SEQ ID NO: 1316 - DNA, 20 bp, synthetic construct
  source 1..20: mol_type = other DNA
aagctttacatcaaaacata

SEQ ID NO: 1317 - DNA, 20 bp, synthetic construct
  source 1..20: mol_type = other DNA
aaggctttacatcaaaacat

SEQ ID NO: 1318 - DNA, 20 bp, synthetic construct
  source 1..20: mol_type = other DNA
aatggctttacatcaaaaca

SEQ ID NO: 1319 - DNA, 20 bp, synthetic construct
  source 1..20: mol_type = other DNA
aattggctttacatcaaaac

SEQ ID NO: 1320 - DNA, 20 bp, synthetic construct
  source 1..20: mol_type = other DNA
aagttggctttacatcaaaa

SEQ ID NO: 1321 - DNA, 20 bp, synthetic construct
  source 1..20: mol_type = other DNA
aatgttggctttacatcaaa

SEQ ID NO: 1322 - DNA, 19 bp, synthetic construct
  source 1..19: mol_type = other DNA
aatgttggctttacatcaa

SEQ ID NO: 1323 - DNA, 18 bp, synthetic construct
  source 1..18: mol_type = other DNA
aatgttggctttacatca

SEQ ID NO: 1324 - DNA, 20 bp, synthetic construct
  source 1..20: mol_type = other DNA
aacaatgttggctttacatc

SEQ ID NO: 1325 - DNA, 19 bp, synthetic construct
  source 1..19: mol_type = other DNA
aacaatgttggctttacat

SEQ ID NO: 1326 - DNA, 20 bp, synthetic construct
  source 1..20: mol_type = other DNA
aatacaatgttggctttaca

SEQ ID NO: 1327 - DNA, 19 bp, synthetic construct
  source 1..19: mol_type = other DNA
aatacaatgttggctttac

SEQ ID NO: 1328 - DNA, 20 bp, synthetic construct
  source 1..20: mol_type = other DNA
aagatacaatgttggcttta

SEQ ID NO: 1329 - DNA, 19 bp, synthetic construct
  source 1..19: mol_type = other DNA
aagatacaatgttggcttt

SEQ ID NO: 1330 - DNA, 20 bp, synthetic construct
  source 1..20: mol_type = other DNA
aatagatacaatgttggctt

SEQ ID NO: 1331 - DNA, 19 bp, synthetic construct
  source 1..19: mol_type = other DNA
aatagatacaatgttggct

SEQ ID NO: 1332 - DNA, 20 bp, synthetic construct
  source 1..20: mol_type = other DNA
aatatagatacaatgttggc

SEQ ID NO: 1333 - DNA, 19 bp, synthetic construct
  source 1..19: mol_type = other DNA
aatatagatacaatgttgg

SEQ ID NO: 1334 - DNA, 20 bp, synthetic construct
  source 1..20: mol_type = other DNA
aatatatagatacaatgttg

SEQ ID NO: 1335 - DNA, 20 bp, synthetic construct
  source 1..20: mol_type = other DNA
aagtatatagatacaatgtt

SEQ ID NO: 1336 - DNA, 20 bp, synthetic construct
  source 1..20: mol_type = other DNA
aatgtatatagatacaatgt

SEQ ID NO: 1337 - DNA, 20 bp, synthetic construct
  source 1..20: mol_type = other DNA
aattgtatatagatacaatg

SEQ ID NO: 1338 - DNA, 19 bp, synthetic construct
  source 1..19: mol_type = other DNA
aattgtatatagatacaat

SEQ ID NO: 1339 - DNA, 20 bp, synthetic construct
  source 1..20: mol_type = other DNA
aatattgtatatagatacaa

SEQ ID NO: 1340 - DNA, 20 bp, synthetic construct
  source 1..20: mol_type = other DNA
aattattgtatatagataca

SEQ ID NO: 1341 - DNA, 20 bp, synthetic construct
  source 1..20: mol_type = other DNA
aatttattgtatatagatac

SEQ ID NO: 1342 - DNA, 20 bp, synthetic construct
  source 1..20: mol_type = other DNA
aagtttattgtatatagata

SEQ ID NO: 1343 - DNA, 19 bp, synthetic construct
  source 1..19: mol_type = other DNA
aagtttattgtatatagat

SEQ ID NO: 1344 - DNA, 20 bp, synthetic construct
  source 1..20: mol_type = other DNA
aatagtttattgtatataga

SEQ ID NO: 1345 - DNA, 20 bp, synthetic construct
  source 1..20: mol_type = other DNA
aagtagtttattgtatatag

SEQ ID NO: 1346 - DNA, 20 bp, synthetic construct
  source 1..20: mol_type = other DNA
aaggtagtttattgtatata

SEQ ID NO: 1347 - DNA, 20 bp, synthetic construct
  source 1..20: mol_type = other DNA
aagggtagtttattgtatat

SEQ ID NO: 1348 - DNA, 20 bp, synthetic construct
  source 1..20: mol_type = other DNA
aaggggtagtttattgtata

SEQ ID NO: 1349 - DNA, 20 bp, synthetic construct
  source 1..20: mol_type = other DNA
aagggggtagtttattgtat

SEQ ID NO: 1350 - DNA, 19 bp, synthetic construct
  source 1..19: mol_type = other DNA
aagggggtagtttattgta

SEQ ID NO: 1351 - DNA, 18 bp, synthetic construct
  source 1..18: mol_type = other DNA
aagggggtagtttattgt

SEQ ID NO: 1352 - DNA, 18 bp, synthetic construct
  source 1..18: mol_type = other DNA
aaagggggtagtttattg

SEQ ID NO: 1353 - DNA, 18 bp, synthetic construct
  source 1..18: mol_type = other DNA
aaaagggggtagtttatt

SEQ ID NO: 1354 - DNA, 20 bp, synthetic construct
  source 1..20: mol_type = other DNA
aacaaaagggggtagtttat

SEQ ID NO: 1355 - DNA, 19 bp, synthetic construct
  source 1..19: mol_type = other DNA
aacaaaagggggtagttta

SEQ ID NO: 1356 - DNA, 18 bp, synthetic construct
  source 1..18: mol_type = other DNA
gatcgacctcgggctaga

SEQ ID NO: 1357 - DNA, 18 bp, synthetic construct
  source 1..18: mol_type = other DNA
cactagatcgacctcggg

SEQ ID NO: 1358 - DNA, 18 bp, synthetic construct
  source 1..18: mol_type = other DNA
ctgagcactagatcgacc

SEQ ID NO: 1359 - DNA, 18 bp, synthetic construct
  source 1..18: mol_type = other DNA
ttgttctgagcactagat

SEQ ID NO: 1360 - DNA, 18 bp, synthetic construct
  source 1..18: mol_type = other DNA
cctgcttgttctgagcac

SEQ ID NO: 1361 - DNA, 18 bp, synthetic construct
  source 1..18: mol_type = other DNA
gtccacctgcttgttctg

SEQ ID NO: 1362 - DNA, 18 bp, synthetic construct
  source 1..18: mol_type = other DNA
ttctcgtccacctgcttg

SEQ ID NO: 1363 - DNA, 18 bp, synthetic construct
  source 1..18: mol_type = other DNA
aagaattctcgtccacct

SEQ ID NO: 1364 - DNA, 18 bp, synthetic construct
  source 1..18: mol_type = other DNA
aatcaaagaattctcgtc

SEQ ID NO: 1365 - DNA, 18 bp, synthetic construct
  source 1..18: mol_type = other DNA
gttgaaatcaaagaattc

SEQ ID NO: 1366 - DNA, 18 bp, synthetic construct
  source 1..18: mol_type = other DNA
ctttggttgaaatcaaag

SEQ ID NO: 1367 - DNA, 18 bp, synthetic construct
  source 1..18: mol_type = other DNA
ctcttctttggttgaaat

SEQ ID NO: 1368 - DNA, 18 bp, synthetic construct
  source 1..18: mol_type = other DNA
ggaggctcttctttggtt

SEQ ID NO: 1369 - DNA, 18 bp, synthetic construct
  source 1..18: mol_type = other DNA
gaactggaggctcttctt

SEQ ID NO: 1370 - DNA, 18 bp, synthetic construct
  source 1..18: mol_type = other DNA
ttcaagaactggaggctc

SEQ ID NO: 1371 - DNA, 18 bp, synthetic construct
  source 1..18: mol_type = other DNA
tccctttcaagaactgga

SEQ ID NO: 1372 - DNA, 18 bp, synthetic construct
  source 1..18: mol_type = other DNA
gagcctccctttcaagaa

SEQ ID NO: 1373 - DNA, 18 bp, synthetic construct
  source 1..18: mol_type = other DNA
aaacggagcctccctttc

SEQ ID NO: 1374 - DNA, 18 bp, synthetic construct
  source 1..18: mol_type = other DNA
tccaaaaacggagcctcc

SEQ ID NO: 1375 - DNA, 18 bp, synthetic construct
  source 1..18: mol_type = other DNA
ggccctccaaaaacggag

SEQ ID NO: 1376 - DNA, 18 bp, synthetic construct
  source 1..18: mol_type = other DNA
caaggggccctccaaaaa

SEQ ID NO: 1377 - DNA, 18 bp, synthetic construct
  source 1..18: mol_type = other DNA
tgagccaaggggccctcc

SEQ ID NO: 1378 - DNA, 18 bp, synthetic construct
  source 1..18: mol_type = other DNA
ctgagccaaggggccctc

SEQ ID NO: 1379 - DNA, 18 bp, synthetic construct
  source 1..18: mol_type = other DNA
tctgactgagccaagggg

SEQ ID NO: 1380 - DNA, 18 bp, synthetic construct
  source 1..18: mol_type = other DNA
caagttctgactgagcca

SEQ ID NO: 1381 - DNA, 18 bp, synthetic construct
  source 1..18: mol_type = other DNA
acctccaagttctgactg

SEQ ID NO: 1382 - DNA, 18 bp, synthetic construct
  source 1..18: mol_type = other DNA
tgtccacctccaagttct

SEQ ID NO: 1383 - DNA, 18 bp, synthetic construct
  source 1..18: mol_type = other DNA
cagcatgtccacctccaa

SEQ ID NO: 1384 - DNA, 18 bp, synthetic construct
  source 1..18: mol_type = other DNA
caactcagcatgtccacc

SEQ ID NO: 1385 - DNA, 18 bp, synthetic construct
  source 1..18: mol_type = other DNA
tgcggcaactcagcatgt

SEQ ID NO: 1386 - DNA, 18 bp, synthetic construct
  source 1..18: mol_type = other DNA
tcagctgcggcaactcag

SEQ ID NO: 1387 - DNA, 18 bp, synthetic construct
  source 1..18: mol_type = other DNA
caaggtcagctgcggcaa

SEQ ID NO: 1388 - DNA, 18 bp, synthetic construct
  source 1..18: mol_type = other DNA
acagacaaggtcagctgc

SEQ ID NO: 1389 - DNA, 18 bp, synthetic construct
  source 1..18: mol_type = other DNA
caggcacagacaaggtca

SEQ ID NO: 1390 - DNA, 18 bp, synthetic construct
  source 1..18: mol_type = other DNA
agccacaggcacagacaa

SEQ ID NO: 1391 - DNA, 18 bp, synthetic construct
  source 1..18: mol_type = other DNA
tccggagccacaggcaca

SEQ ID NO: 1392 - DNA, 18 bp, synthetic construct
  source 1..18: mol_type = other DNA
agacttccggagccacag

SEQ ID NO: 1393 - DNA, 18 bp, synthetic construct
  source 1..18: mol_type = other DNA
tggagagacttccggagc

SEQ ID NO: 1394 - DNA, 18 bp, synthetic construct
  source 1..18: mol_type = other DNA
ggccgtggagagacttcc

SEQ ID NO: 1395 - DNA, 18 bp, synthetic construct
  source 1..18: mol_type = other DNA
gggcaggccgtggagaga

SEQ ID NO: 1396 - DNA, 18 bp, synthetic construct
  source 1..18: mol_type = other DNA
ctcaagggcaggccgtgg

SEQ ID NO: 1397 - DNA, 18 bp, synthetic construct
  source 1..18: mol_type = other DNA
tcagactcaagggcaggc

SEQ ID NO: 1398 - DNA, 18 bp, synthetic construct
  source 1..18: mol_type = other DNA
attcctcagactcaaggg

SEQ ID NO: 1399 - DNA, 18 bp, synthetic construct
  source 1..18: mol_type = other DNA
tagcaattcctcagactc

SEQ ID NO: 1400 - DNA, 18 bp, synthetic construct
  source 1..18: mol_type = other DNA
ttaactagcaattcctca

SEQ ID NO: 1401 - DNA, 18 bp, synthetic construct
  source 1..18: mol_type = other DNA
gcgttttaactagcaatt

SEQ ID NO: 1402 - DNA, 18 bp, synthetic construct
  source 1..18: mol_type = other DNA
ccaaccccaccttacctg

SEQ ID NO: 1403 - DNA, 18 bp, synthetic construct
  source 1..18: mol_type = other DNA
agaccccaaccccacctt

SEQ ID NO: 1404 - DNA, 18 bp, synthetic construct
  source 1..18: mol_type = other DNA
tactgagaccccaacccc

SEQ ID NO: 1405 - DNA, 18 bp, synthetic construct
  source 1..18: mol_type = other DNA
tcaaatactgagacccca

SEQ ID NO: 1406 - DNA, 18 bp, synthetic construct
  source 1..18: mol_type = other DNA
tctgctcaaatactgaga

SEQ ID NO: 1407 - DNA, 18 bp, synthetic construct
  source 1..18: mol_type = other DNA
tcatatctgctcaaatac

SEQ ID NO: 1408 - DNA, 18 bp, synthetic construct
  source 1..18: mol_type = other DNA
tctaatcatatctgctca

SEQ ID NO: 1409 - DNA, 18 bp, synthetic construct
  source 1..18: mol_type = other DNA
cttcctctaatcatatct

SEQ ID NO: 1410 - DNA, 18 bp, synthetic construct
  source 1..18: mol_type = other DNA
tcctgcttcctctaatca

SEQ ID NO: 1411 - DNA, 18 bp, synthetic construct
  source 1..18: mol_type = other DNA
aaatctcctgcttcctct

SEQ ID NO: 1412 - DNA, 18 bp, synthetic construct
  source 1..18: mol_type = other DNA
tactaaaatctcctgctt

SEQ ID NO: 1413 - DNA, 18 bp, synthetic construct
  source 1..18: mol_type = other DNA
aaacatactaaaatctcc

SEQ ID NO: 1414 - DNA, 18 bp, synthetic construct
  source 1..18: mol_type = other DNA
catcaaaacatactaaaa

SEQ ID NO: 1415 - DNA, 18 bp, synthetic construct
  source 1..18: mol_type = other DNA
ctttacatcaaaacatac

SEQ ID NO: 1416 - DNA, 18 bp, synthetic construct
  source 1..18: mol_type = other DNA
gttggctttacatcaaaa

SEQ ID NO: 1417 - DNA, 18 bp, synthetic construct
  source 1..18: mol_type = other DNA
acaatgttggctttacat

SEQ ID NO: 1418 - DNA, 18 bp, synthetic construct
  source 1..18: mol_type = other DNA
tagatacaatgttggctt

SEQ ID NO: 1419 - DNA, 18 bp, synthetic construct
  source 1..18: mol_type = other DNA
gtatatagatacaatgtt

SEQ ID NO: 1420 - DNA, 18 bp, synthetic construct
  source 1..18: mol_type = other DNA
ttattgtatatagataca

SEQ ID NO: 1421 - DNA, 18 bp, synthetic construct
  source 1..18: mol_type = other DNA
gtagtttattgtatatag

SEQ ID NO: 1422 - DNA, 18 bp, synthetic construct
  source 1..18: mol_type = other DNA
agggggtagtttattgta

SEQ ID NO: 1423 - DNA, 18 bp, synthetic construct
  source 1..18: mol_type = other DNA
aaagggggtagtttattg

SEQ ID NO: 1424 - DNA, 18 bp, synthetic construct
  source 1..18: mol_type = other DNA
gatcgacctcgggctaga

SEQ ID NO: 1425 - DNA, 18 bp, synthetic construct
  source 1..18: mol_type = other DNA
agatcgacctcgggctag

SEQ ID NO: 1426 - DNA, 18 bp, synthetic construct
  source 1..18: mol_type = other DNA
tagatcgacctcgggcta

SEQ ID NO: 1427 - DNA, 18 bp, synthetic construct
  source 1..18: mol_type = other DNA
ctagatcgacctcgggct

SEQ ID NO: 1428 - DNA, 18 bp, synthetic construct
  source 1..18: mol_type = other DNA
actagatcgacctcgggc

SEQ ID NO: 1429 - DNA, 18 bp, synthetic construct
  source 1..18: mol_type = other DNA
cactagatcgacctcggg

SEQ ID NO: 1430 - DNA, 18 bp, synthetic construct
  source 1..18: mol_type = other DNA
gcactagatcgacctcgg

SEQ ID NO: 1431 - DNA, 18 bp, synthetic construct
  source 1..18: mol_type = other DNA
agcactagatcgacctcg

SEQ ID NO: 1432 - DNA, 18 bp, synthetic construct
  source 1..18: mol_type = other DNA
gagcactagatcgacctc

SEQ ID NO: 1433 - DNA, 18 bp, synthetic construct
  source 1..18: mol_type = other DNA
tgagcactagatcgacct

SEQ ID NO: 1434 - DNA, 18 bp, synthetic construct
  source 1..18: mol_type = other DNA
ctgagcactagatcgacc

SEQ ID NO: 1435 - DNA, 18 bp, synthetic construct
  source 1..18: mol_type = other DNA
tctgagcactagatcgac

SEQ ID NO: 1436 - DNA, 18 bp, synthetic construct
  source 1..18: mol_type = other DNA
ttctgagcactagatcga

SEQ ID NO: 1437 - DNA, 18 bp, synthetic construct
  source 1..18: mol_type = other DNA
gttctgagcactagatcg

SEQ ID NO: 1438 - DNA, 18 bp, synthetic construct
  source 1..18: mol_type = other DNA
tgttctgagcactagatc

SEQ ID NO: 1439 - DNA, 18 bp, synthetic construct
  source 1..18: mol_type = other DNA
ttgttctgagcactagat

SEQ ID NO: 1440 - DNA, 18 bp, synthetic construct
  source 1..18: mol_type = other DNA
cttgttctgagcactaga

SEQ ID NO: 1441 - DNA, 18 bp, synthetic construct
  source 1..18: mol_type = other DNA
gcttgttctgagcactag

SEQ ID NO: 1442 - DNA, 18 bp, synthetic construct
  source 1..18: mol_type = other DNA
tgcttgttctgagcacta

SEQ ID NO: 1443 - DNA, 18 bp, synthetic construct
  source 1..18: mol_type = other DNA
ctgcttgttctgagcact

SEQ ID NO: 1444 - DNA, 18 bp, synthetic construct
  source 1..18: mol_type = other DNA
cctgcttgttctgagcac

SEQ ID NO: 1445 - DNA, 18 bp, synthetic construct
  source 1..18: mol_type = other DNA
acctgcttgttctgagca

SEQ ID NO: 1446 - DNA, 18 bp, synthetic construct
  source 1..18: mol_type = other DNA
cacctgcttgttctgagc

SEQ ID NO: 1447 - DNA, 18 bp, synthetic construct
  source 1..18: mol_type = other DNA
ccacctgcttgttctgag

SEQ ID NO: 1448 - DNA, 18 bp, synthetic construct
  source 1..18: mol_type = other DNA
tccacctgcttgttctga

SEQ ID NO: 1449 - DNA, 18 bp, synthetic construct
  source 1..18: mol_type = other DNA
gtccacctgcttgttctg

SEQ ID NO: 1450 - DNA, 18 bp, synthetic construct
  source 1..18: mol_type = other DNA
cgtccacctgcttgttct

SEQ ID NO: 1451 - DNA, 18 bp, synthetic construct
  source 1..18: mol_type = other DNA
tcgtccacctgcttgttc

SEQ ID NO: 1452 - DNA, 18 bp, synthetic construct
  source 1..18: mol_type = other DNA
ctcgtccacctgcttgtt

SEQ ID NO: 1453 - DNA, 18 bp, synthetic construct
  source 1..18: mol_type = other DNA
tctcgtccacctgcttgt

SEQ ID NO: 1454 - DNA, 18 bp, synthetic construct
  source 1..18: mol_type = other DNA
ttctcgtccacctgcttg

SEQ ID NO: 1455 - DNA, 18 bp, synthetic construct
  source 1..18: mol_type = other DNA
attctcgtccacctgctt

SEQ ID NO: 1456 - DNA, 18 bp, synthetic construct
  source 1..18: mol_type = other DNA
aattctcgtccacctgct

SEQ ID NO: 1457 - DNA, 18 bp, synthetic construct
  source 1..18: mol_type = other DNA
gaattctcgtccacctgc

SEQ ID NO: 1458 - DNA, 18 bp, synthetic construct
  source 1..18: mol_type = other DNA
agaattctcgtccacctg

SEQ ID NO: 1459 - DNA, 18 bp, synthetic construct
  source 1..18: mol_type = other DNA
aagaattctcgtccacct

SEQ ID NO: 1460 - DNA, 18 bp, synthetic construct
  source 1..18: mol_type = other DNA
aaagaattctcgtccacc

SEQ ID NO: 1461 - DNA, 18 bp, synthetic construct
  source 1..18: mol_type = other DNA
caaagaattctcgtccac

SEQ ID NO: 1462 - DNA, 18 bp, synthetic construct
  source 1..18: mol_type = other DNA
tcaaagaattctcgtcca

SEQ ID NO: 1463 - DNA, 18 bp, synthetic construct
  source 1..18: mol_type = other DNA
atcaaagaattctcgtcc

SEQ ID NO: 1464 - DNA, 18 bp, synthetic construct
  source 1..18: mol_type = other DNA
aatcaaagaattctcgtc

SEQ ID NO: 1465 - DNA, 18 bp, synthetic construct
  source 1..18: mol_type = other DNA
aaatcaaagaattctcgt

SEQ ID NO: 1466 - DNA, 18 bp, synthetic construct
  source 1..18: mol_type = other DNA
gaaatcaaagaattctcg

SEQ ID NO: 1467 - DNA, 18 bp, synthetic construct
  source 1..18: mol_type = other DNA
tgaaatcaaagaattctc

SEQ ID NO: 1468 - DNA, 18 bp, synthetic construct
  source 1..18: mol_type = other DNA
ttgaaatcaaagaattct

SEQ ID NO: 1469 - DNA, 18 bp, synthetic construct
  source 1..18: mol_type = other DNA
gttgaaatcaaagaattc

SEQ ID NO: 1470 - DNA, 18 bp, synthetic construct
  source 1..18: mol_type = other DNA
ggttgaaatcaaagaatt

SEQ ID NO: 1471 - DNA, 18 bp, synthetic construct
  source 1..18: mol_type = other DNA
tggttgaaatcaaagaat

SEQ ID NO: 1472 - DNA, 18 bp, synthetic construct
  source 1..18: mol_type = other DNA
ttggttgaaatcaaagaa

SEQ ID NO: 1473 - DNA, 18 bp, synthetic construct
  source 1..18: mol_type = other DNA
tttggttgaaatcaaaga

SEQ ID NO: 1474 - DNA, 18 bp, synthetic construct
  source 1..18: mol_type = other DNA
ctttggttgaaatcaaag

SEQ ID NO: 1475 - DNA, 18 bp, synthetic construct
  source 1..18: mol_type = other DNA
tctttggttgaaatcaaa

SEQ ID NO: 1476 - DNA, 18 bp, synthetic construct
  source 1..18: mol_type = other DNA
ttctttggttgaaatcaa

SEQ ID NO: 1477 - DNA, 18 bp, synthetic construct
  source 1..18: mol_type = other DNA
cttctttggttgaaatca

SEQ ID NO: 1478 - DNA, 18 bp, synthetic construct
  source 1..18: mol_type = other DNA
tcttctttggttgaaatc

SEQ ID NO: 1479 - DNA, 18 bp, synthetic construct
  source 1..18: mol_type = other DNA
ctcttctttggttgaaat

SEQ ID NO: 1480 - DNA, 18 bp, synthetic construct
  source 1..18: mol_type = other DNA
gctcttctttggttgaaa

SEQ ID NO: 1481 - DNA, 18 bp, synthetic construct
  source 1..18: mol_type = other DNA
ggctcttctttggttgaa

SEQ ID NO: 1482 - DNA, 18 bp, synthetic construct
  source 1..18: mol_type = other DNA
aggctcttctttggttga

SEQ ID NO: 1483 - DNA, 18 bp, synthetic construct
  source 1..18: mol_type = other DNA
gaggctcttctttggttg

SEQ ID NO: 1484 - DNA, 18 bp, synthetic construct
  source 1..18: mol_type = other DNA
ggaggctcttctttggtt

SEQ ID NO: 1485 - DNA, 18 bp, synthetic construct
  source 1..18: mol_type = other DNA
tggaggctcttctttggt

SEQ ID NO: 1486 - DNA, 18 bp, synthetic construct
  source 1..18: mol_type = other DNA
ctggaggctcttctttgg

SEQ ID NO: 1487 - DNA, 18 bp, synthetic construct
  source 1..18: mol_type = other DNA
actggaggctcttctttg

SEQ ID NO: 1488 - DNA, 18 bp, synthetic construct
  source 1..18: mol_type = other DNA
aactggaggctcttcttt

SEQ ID NO: 1489 - DNA, 18 bp, synthetic construct
  source 1..18: mol_type = other DNA
gaactggaggctcttctt

SEQ ID NO: 1490 - DNA, 18 bp, synthetic construct
  source 1..18: mol_type = other DNA
agaactggaggctcttct

SEQ ID NO: 1491 - DNA, 18 bp, synthetic construct
  source 1..18: mol_type = other DNA
aagaactggaggctcttc

SEQ ID NO: 1492 - DNA, 18 bp, synthetic construct
  source 1..18: mol_type = other DNA
caagaactggaggctctt

SEQ ID NO: 1493 - DNA, 18 bp, synthetic construct
  source 1..18: mol_type = other DNA
tcaagaactggaggctct

SEQ ID NO: 1494 - DNA, 18 bp, synthetic construct
  source 1..18: mol_type = other DNA
ttcaagaactggaggctc

SEQ ID NO: 1495 - DNA, 18 bp, synthetic construct
  source 1..18: mol_type = other DNA
tttcaagaactggaggct

SEQ ID NO: 1496 - DNA, 18 bp, synthetic construct
  source 1..18: mol_type = other DNA
ctttcaagaactggaggc

SEQ ID NO: 1497 - DNA, 18 bp, synthetic construct
  source 1..18: mol_type = other DNA
cctttcaagaactggagg

SEQ ID NO: 1498 - DNA, 18 bp, synthetic construct
  source 1..18: mol_type = other DNA
ccctttcaagaactggag

SEQ ID NO: 1499 - DNA, 18 bp, synthetic construct
  source 1..18: mol_type = other DNA
tccctttcaagaactgga

SEQ ID NO: 1500 - DNA, 18 bp, synthetic construct
  source 1..18: mol_type = other DNA
ctccctttcaagaactgg

SEQ ID NO: 1501 - DNA, 18 bp, synthetic construct
  source 1..18: mol_type = other DNA
cctccctttcaagaactg

SEQ ID NO: 1502 - DNA, 18 bp, synthetic construct
  source 1..18: mol_type = other DNA
gcctccctttcaagaact

SEQ ID NO: 1503 - DNA, 18 bp, synthetic construct
  source 1..18: mol_type = other DNA
agcctccctttcaagaac

SEQ ID NO: 1504 - DNA, 18 bp, synthetic construct
  source 1..18: mol_type = other DNA
gagcctccctttcaagaa

SEQ ID NO: 1505 - DNA, 18 bp, synthetic construct
  source 1..18: mol_type = other DNA
ggagcctccctttcaaga

SEQ ID NO: 1506 - DNA, 18 bp, synthetic construct
  source 1..18: mol_type = other DNA
cggagcctccctttcaag

SEQ ID NO: 1507 - DNA, 18 bp, synthetic construct
  source 1..18: mol_type = other DNA
acggagcctccctttcaa

SEQ ID NO: 1508 - DNA, 18 bp, synthetic construct
  source 1..18: mol_type = other DNA
aacggagcctccctttca

SEQ ID NO: 1509 - DNA, 18 bp, synthetic construct
  source 1..18: mol_type = other DNA
aaacggagcctccctttc

SEQ ID NO: 1510 - DNA, 18 bp, synthetic construct
  source 1..18: mol_type = other DNA
aaaacggagcctcccttt

SEQ ID NO: 1511 - DNA, 18 bp, synthetic construct
  source 1..18: mol_type = other DNA
aaaaacggagcctccctt

SEQ ID NO: 1512 - DNA, 18 bp, synthetic construct
  source 1..18: mol_type = other DNA
caaaaacggagcctccct

SEQ ID NO: 1513 - DNA, 18 bp, synthetic construct
  source 1..18: mol_type = other DNA
ccaaaaacggagcctccc

SEQ ID NO: 1514 - DNA, 18 bp, synthetic construct
  source 1..18: mol_type = other DNA
tccaaaaacggagcctcc

SEQ ID NO: 1515 - DNA, 18 bp, synthetic construct
  source 1..18: mol_type = other DNA
ctccaaaaacggagcctc

SEQ ID NO: 1516 - DNA, 18 bp, synthetic construct
  source 1..18: mol_type = other DNA
cctccaaaaacggagcct

SEQ ID NO: 1517 - DNA, 18 bp, synthetic construct
  source 1..18: mol_type = other DNA
ccctccaaaaacggagcc

SEQ ID NO: 1518 - DNA, 18 bp, synthetic construct
  source 1..18: mol_type = other DNA
gccctccaaaaacggagc

SEQ ID NO: 1519 - DNA, 18 bp, synthetic construct
  source 1..18: mol_type = other DNA
ggccctccaaaaacggag

SEQ ID NO: 1520 - DNA, 18 bp, synthetic construct
  source 1..18: mol_type = other DNA
gggccctccaaaaacgga

SEQ ID NO: 1521 - DNA, 18 bp, synthetic construct
  source 1..18: mol_type = other DNA
ggggccctccaaaaacgg

SEQ ID NO: 1522 - DNA, 18 bp, synthetic construct
  source 1..18: mol_type = other DNA
aggggccctccaaaaacg

SEQ ID NO: 1523 - DNA, 18 bp, synthetic construct
  source 1..18: mol_type = other DNA
aaggggccctccaaaaac

SEQ ID NO: 1524 - DNA, 18 bp, synthetic construct
  source 1..18: mol_type = other DNA
caaggggccctccaaaaa

SEQ ID NO: 1525 - DNA, 18 bp, synthetic construct
  source 1..18: mol_type = other DNA
ccaaggggccctccaaaa

SEQ ID NO: 1526 - DNA, 18 bp, synthetic construct
  source 1..18: mol_type = other DNA
gccaaggggccctccaaa

SEQ ID NO: 1527 - DNA, 18 bp, synthetic construct
  source 1..18: mol_type = other DNA
agccaaggggccctccaa

SEQ ID NO: 1528 - DNA, 18 bp, synthetic construct
  source 1..18: mol_type = other DNA
gagccaaggggccctcca

SEQ ID NO: 1529 - DNA, 18 bp, synthetic construct
  source 1..18: mol_type = other DNA
tgagccaaggggccctcc

SEQ ID NO: 1530 - DNA, 18 bp, synthetic construct
  source 1..18: mol_type = other DNA
ctgagccaaggggccctc

SEQ ID NO: 1531 - DNA, 18 bp, synthetic construct
  source 1..18: mol_type = other DNA
actgagccaaggggccct

SEQ ID NO: 1532 - DNA, 18 bp, synthetic construct
  source 1..18: mol_type = other DNA
gactgagccaaggggccc

SEQ ID NO: 1533 - DNA, 18 bp, synthetic construct
  source 1..18: mol_type = other DNA
tgactgagccaaggggcc

SEQ ID NO: 1534 - DNA, 18 bp, synthetic construct
  source 1..18: mol_type = other DNA
ctgactgagccaaggggc

SEQ ID NO: 1535 - DNA, 18 bp, synthetic construct
  source 1..18: mol_type = other DNA
tctgactgagccaagggg

SEQ ID NO: 1536 - DNA, 18 bp, synthetic construct
  source 1..18: mol_type = other DNA
ttctgactgagccaaggg

SEQ ID NO: 1537 - DNA, 18 bp, synthetic construct
  source 1..18: mol_type = other DNA
gttctgactgagccaagg

SEQ ID NO: 1538 - DNA, 18 bp, synthetic construct
  source 1..18: mol_type = other DNA
agttctgactgagccaag

SEQ ID NO: 1539 - DNA, 18 bp, synthetic construct
  source 1..18: mol_type = other DNA
aagttctgactgagccaa

SEQ ID NO: 1540 - DNA, 18 bp, synthetic construct
  source 1..18: mol_type = other DNA
caagttctgactgagcca

SEQ ID NO: 1541 - DNA, 18 bp, synthetic construct
  source 1..18: mol_type = other DNA
ccaagttctgactgagcc

SEQ ID NO: 1542 - DNA, 18 bp, synthetic construct
  source 1..18: mol_type = other DNA
tccaagttctgactgagc

SEQ ID NO: 1543 - DNA, 18 bp, synthetic construct
  source 1..18: mol_type = other DNA
ctccaagttctgactgag

SEQ ID NO: 1544 - DNA, 18 bp, synthetic construct
  source 1..18: mol_type = other DNA
cctccaagttctgactga

SEQ ID NO: 1545 - DNA, 18 bp, synthetic construct
  source 1..18: mol_type = other DNA
acctccaagttctgactg

SEQ ID NO: 1546 - DNA, 18 bp, synthetic construct
  source 1..18: mol_type = other DNA
cacctccaagttctgact

SEQ ID NO: 1547 - DNA, 18 bp, synthetic construct
  source 1..18: mol_type = other DNA
ccacctccaagttctgac

SEQ ID NO: 1548 - DNA, 18 bp, synthetic construct
  source 1..18: mol_type = other DNA
tccacctccaagttctga

SEQ ID NO: 1549 - DNA, 18 bp, synthetic construct
  source 1..18: mol_type = other DNA
gtccacctccaagttctg

SEQ ID NO: 1550 - DNA, 18 bp, synthetic construct
  source 1..18: mol_type = other DNA
tgtccacctccaagttct

SEQ ID NO: 1551 - DNA, 18 bp, synthetic construct
  source 1..18: mol_type = other DNA
atgtccacctccaagttc

SEQ ID NO: 1552 - DNA, 18 bp, synthetic construct
  source 1..18: mol_type = other DNA
catgtccacctccaagtt

SEQ ID NO: 1553 - DNA, 18 bp, synthetic construct
  source 1..18: mol_type = other DNA
gcatgtccacctccaagt

SEQ ID NO: 1554 - DNA, 18 bp, synthetic construct
  source 1..18: mol_type = other DNA
agcatgtccacctccaag

SEQ ID NO: 1555 - DNA, 18 bp, synthetic construct
  source 1..18: mol_type = other DNA
cagcatgtccacctccaa

SEQ ID NO: 1556 - DNA, 18 bp, synthetic construct
  source 1..18: mol_type = other DNA
tcagcatgtccacctcca

SEQ ID NO: 1557 - DNA, 18 bp, synthetic construct
  source 1..18: mol_type = other DNA
ctcagcatgtccacctcc

SEQ ID NO: 1558 - DNA, 18 bp, synthetic construct
  source 1..18: mol_type = other DNA
actcagcatgtccacctc

SEQ ID NO: 1559 - DNA, 18 bp, synthetic construct
  source 1..18: mol_type = other DNA
aactcagcatgtccacct

SEQ ID NO: 1560 - DNA, 18 bp, synthetic construct
  source 1..18: mol_type = other DNA
caactcagcatgtccacc

SEQ ID NO: 1561 - DNA, 18 bp, synthetic construct
  source 1..18: mol_type = other DNA
gcaactcagcatgtccac

SEQ ID NO: 1562 - DNA, 18 bp, synthetic construct
  source 1..18: mol_type = other DNA
ggcaactcagcatgtcca

SEQ ID NO: 1563 - DNA, 18 bp, synthetic construct
  source 1..18: mol_type = other DNA
cggcaactcagcatgtcc

SEQ ID NO: 1564 - DNA, 18 bp, synthetic construct
  source 1..18: mol_type = other DNA
gcggcaactcagcatgtc

SEQ ID NO: 1565 - DNA, 18 bp, synthetic construct
  source 1..18: mol_type = other DNA
tgcggcaactcagcatgt

SEQ ID NO: 1566 - DNA, 18 bp, synthetic construct
  source 1..18: mol_type = other DNA
ctgcggcaactcagcatg

SEQ ID NO: 1567 - DNA, 18 bp, synthetic construct
  source 1..18: mol_type = other DNA
gctgcggcaactcagcat

SEQ ID NO: 1568 - DNA, 18 bp, synthetic construct
  source 1..18: mol_type = other DNA
agctgcggcaactcagca

SEQ ID NO: 1569 - DNA, 18 bp, synthetic construct
  source 1..18: mol_type = other DNA
cagctgcggcaactcagc

SEQ ID NO: 1570 - DNA, 18 bp, synthetic construct
  source 1..18: mol_type = other DNA
tcagctgcggcaactcag

SEQ ID NO: 1571 - DNA, 18 bp, synthetic construct
  source 1..18: mol_type = other DNA
gtcagctgcggcaactca

SEQ ID NO: 1572 - DNA, 18 bp, synthetic construct
  source 1..18: mol_type = other DNA
ggtcagctgcggcaactc

SEQ ID NO: 1573 - DNA, 18 bp, synthetic construct
  source 1..18: mol_type = other DNA
aggtcagctgcggcaact

SEQ ID NO: 1574 - DNA, 18 bp, synthetic construct
  source 1..18: mol_type = other DNA
aaggtcagctgcggcaac

SEQ ID NO: 1575 - DNA, 18 bp, synthetic construct
  source 1..18: mol_type = other DNA
caaggtcagctgcggcaa

SEQ ID NO: 1576 - DNA, 18 bp, synthetic construct
  source 1..18: mol_type = other DNA
acaaggtcagctgcggca

SEQ ID NO: 1577 - DNA, 18 bp, synthetic construct
  source 1..18: mol_type = other DNA
gacaaggtcagctgcggc

SEQ ID NO: 1578 - DNA, 18 bp, synthetic construct
  source 1..18: mol_type = other DNA
agacaaggtcagctgcgg

SEQ ID NO: 1579 - DNA, 18 bp, synthetic construct
  source 1..18: mol_type = other DNA
cagacaaggtcagctgcg

SEQ ID NO: 1580 - DNA, 18 bp, synthetic construct
  source 1..18: mol_type = other DNA
acagacaaggtcagctgc

SEQ ID NO: 1581 - DNA, 18 bp, synthetic construct
  source 1..18: mol_type = other DNA
cacagacaaggtcagctg

SEQ ID NO: 1582 - DNA, 18 bp, synthetic construct
  source 1..18: mol_type = other DNA
gcacagacaaggtcagct

SEQ ID NO: 1583 - DNA, 18 bp, synthetic construct
  source 1..18: mol_type = other DNA
ggcacagacaaggtcagc

SEQ ID NO: 1584 - DNA, 18 bp, synthetic construct
  source 1..18: mol_type = other DNA
aggcacagacaaggtcag

SEQ ID NO: 1585 - DNA, 18 bp, synthetic construct
  source 1..18: mol_type = other DNA
caggcacagacaaggtca

SEQ ID NO: 1586 - DNA, 18 bp, synthetic construct
  source 1..18: mol_type = other DNA
acaggcacagacaaggtc

SEQ ID NO: 1587 - DNA, 18 bp, synthetic construct
  source 1..18: mol_type = other DNA
cacaggcacagacaaggt

SEQ ID NO: 1588 - DNA, 18 bp, synthetic construct
  source 1..18: mol_type = other DNA
ccacaggcacagacaagg

SEQ ID NO: 1589 - DNA, 18 bp, synthetic construct
  source 1..18: mol_type = other DNA
gccacaggcacagacaag

SEQ ID NO: 1590 - DNA, 18 bp, synthetic construct
  source 1..18: mol_type = other DNA
agccacaggcacagacaa

SEQ ID NO: 1591 - DNA, 18 bp, synthetic construct
  source 1..18: mol_type = other DNA
gagccacaggcacagaca

SEQ ID NO: 1592 - DNA, 18 bp, synthetic construct
  source 1..18: mol_type = other DNA
ggagccacaggcacagac

SEQ ID NO: 1593 - DNA, 18 bp, synthetic construct
  source 1..18: mol_type = other DNA
cggagccacaggcacaga

SEQ ID NO: 1594 - DNA, 18 bp, synthetic construct
  source 1..18: mol_type = other DNA
ccggagccacaggcacag

SEQ ID NO: 1595 - DNA, 18 bp, synthetic construct
  source 1..18: mol_type = other DNA
tccggagccacaggcaca

SEQ ID NO: 1596 - DNA, 18 bp, synthetic construct
  source 1..18: mol_type = other DNA
ttccggagccacaggcac

SEQ ID NO: 1597 - DNA, 18 bp, synthetic construct
  source 1..18: mol_type = other DNA
cttccggagccacaggca

SEQ ID NO: 1598 - DNA, 18 bp, synthetic construct
  source 1..18: mol_type = other DNA
acttccggagccacaggc

SEQ ID NO: 1599 - DNA, 18 bp, synthetic construct
  source 1..18: mol_type = other DNA
gacttccggagccacagg

SEQ ID NO: 1600 - DNA, 18 bp, synthetic construct
  source 1..18: mol_type = other DNA
agacttccggagccacag

SEQ ID NO: 1601 - DNA, 18 bp, synthetic construct
  source 1..18: mol_type = other DNA
gagacttccggagccaca

SEQ ID NO: 1602 - DNA, 18 bp, synthetic construct
  source 1..18: mol_type = other DNA
agagacttccggagccac

SEQ ID NO: 1603 - DNA, 18 bp, synthetic construct
  source 1..18: mol_type = other DNA
gagagacttccggagcca

SEQ ID NO: 1604 - DNA, 18 bp, synthetic construct
  source 1..18: mol_type = other DNA
ggagagacttccggagcc

SEQ ID NO: 1605 - DNA, 18 bp, synthetic construct
  source 1..18: mol_type = other DNA
tggagagacttccggagc

SEQ ID NO: 1606 - DNA, 18 bp, synthetic construct
  source 1..18: mol_type = other DNA
gtggagagacttccggag

SEQ ID NO: 1607 - DNA, 18 bp, synthetic construct
  source 1..18: mol_type = other DNA
cgtggagagacttccgga

SEQ ID NO: 1608 - DNA, 18 bp, synthetic construct
  source 1..18: mol_type = other DNA
ccgtggagagacttccgg

SEQ ID NO: 1609 - DNA, 18 bp, synthetic construct
  source 1..18: mol_type = other DNA
gccgtggagagacttccg

SEQ ID NO: 1610 - DNA, 18 bp, synthetic construct
  source 1..18: mol_type = other DNA
ggccgtggagagacttcc

SEQ ID NO: 1611 - DNA, 18 bp, synthetic construct
  source 1..18: mol_type = other DNA
aggccgtggagagacttc

SEQ ID NO: 1612 - DNA, 18 bp, synthetic construct
  source 1..18: mol_type = other DNA
caggccgtggagagactt

SEQ ID NO: 1613 - DNA, 18 bp, synthetic construct
  source 1..18: mol_type = other DNA
gcaggccgtggagagact

SEQ ID NO: 1614 - DNA, 18 bp, synthetic construct
  source 1..18: mol_type = other DNA
ggcaggccgtggagagac

SEQ ID NO: 1615 - DNA, 18 bp, synthetic construct
  source 1..18: mol_type = other DNA
gggcaggccgtggagaga

SEQ ID NO: 1616 - DNA, 18 bp, synthetic construct
  source 1..18: mol_type = other DNA
agggcaggccgtggagag

SEQ ID NO: 1617 - DNA, 18 bp, synthetic construct
  source 1..18: mol_type = other DNA
aagggcaggccgtggaga

SEQ ID NO: 1618 - DNA, 18 bp, synthetic construct
  source 1..18: mol_type = other DNA
caagggcaggccgtggag

SEQ ID NO: 1619 - DNA, 18 bp, synthetic construct
  source 1..18: mol_type = other DNA
tcaagggcaggccgtgga

SEQ ID NO: 1620 - DNA, 18 bp, synthetic construct
  source 1..18: mol_type = other DNA
ctcaagggcaggccgtgg

SEQ ID NO: 1621 - DNA, 18 bp, synthetic construct
  source 1..18: mol_type = other DNA
actcaagggcaggccgtg

SEQ ID NO: 1622 - DNA, 18 bp, synthetic construct
  source 1..18: mol_type = other DNA
gactcaagggcaggccgt

SEQ ID NO: 1623 - DNA, 18 bp, synthetic construct
  source 1..18: mol_type = other DNA
agactcaagggcaggccg

SEQ ID NO: 1624 - DNA, 18 bp, synthetic construct
  source 1..18: mol_type = other DNA
cagactcaagggcaggcc

SEQ ID NO: 1625 - DNA, 18 bp, synthetic construct
  source 1..18: mol_type = other DNA
tcagactcaagggcaggc

SEQ ID NO: 1626 - DNA, 18 bp, synthetic construct
  source 1..18: mol_type = other DNA
ctcagactcaagggcagg

SEQ ID NO: 1627 - DNA, 18 bp, synthetic construct
  source 1..18: mol_type = other DNA
cctcagactcaagggcag

SEQ ID NO: 1628 - DNA, 18 bp, synthetic construct
  source 1..18: mol_type = other DNA
tcctcagactcaagggca

SEQ ID NO: 1629 - DNA, 18 bp, synthetic construct
  source 1..18: mol_type = other DNA
ttcctcagactcaagggc

SEQ ID NO: 1630 - DNA, 18 bp, synthetic construct
  source 1..18: mol_type = other DNA
attcctcagactcaaggg

SEQ ID NO: 1631 - DNA, 18 bp, synthetic construct
  source 1..18: mol_type = other DNA
aattcctcagactcaagg

SEQ ID NO: 1632 - DNA, 18 bp, synthetic construct
  source 1..18: mol_type = other DNA
caattcctcagactcaag

SEQ ID NO: 1633 - DNA, 18 bp, synthetic construct
  source 1..18: mol_type = other DNA
gcaattcctcagactcaa

SEQ ID NO: 1634 - DNA, 18 bp, synthetic construct
  source 1..18: mol_type = other DNA
agcaattcctcagactca

SEQ ID NO: 1635 - DNA, 18 bp, synthetic construct
  source 1..18: mol_type = other DNA
tagcaattcctcagactc

SEQ ID NO: 1636 - DNA, 18 bp, synthetic construct
  source 1..18: mol_type = other DNA
ctagcaattcctcagact

SEQ ID NO: 1637 - DNA, 18 bp, synthetic construct
  source 1..18: mol_type = other DNA
actagcaattcctcagac

SEQ ID NO: 1638 - DNA, 18 bp, synthetic construct
  source 1..18: mol_type = other DNA
aactagcaattcctcaga

SEQ ID NO: 1639 - DNA, 18 bp, synthetic construct
  source 1..18: mol_type = other DNA
taactagcaattcctcag

SEQ ID NO: 1640 - DNA, 18 bp, synthetic construct
  source 1..18: mol_type = other DNA
ttaactagcaattcctca

SEQ ID NO: 1641 - DNA, 18 bp, synthetic construct
  source 1..18: mol_type = other DNA
tttaactagcaattcctc

SEQ ID NO: 1642 - DNA, 18 bp, synthetic construct
  source 1..18: mol_type = other DNA
ttttaactagcaattcct

SEQ ID NO: 1643 - DNA, 18 bp, synthetic construct
  source 1..18: mol_type = other DNA
gttttaactagcaattcc

SEQ ID NO: 1644 - DNA, 18 bp, synthetic construct
  source 1..18: mol_type = other DNA
cgttttaactagcaattc

SEQ ID NO: 1645 - DNA, 18 bp, synthetic construct
  source 1..18: mol_type = other DNA
gcgttttaactagcaatt

SEQ ID NO: 1646 - DNA, 18 bp, synthetic construct
  source 1..18: mol_type = other DNA
ccaaccccaccttacctg

SEQ ID NO: 1647 - DNA, 18 bp, synthetic construct
  source 1..18: mol_type = other DNA
cccaaccccaccttacct

SEQ ID NO: 1648 - DNA, 18 bp, synthetic construct
  source 1..18: mol_type = other DNA
ccccaaccccaccttacc

SEQ ID NO: 1649 - DNA, 18 bp, synthetic construct
  source 1..18: mol_type = other DNA
accccaaccccaccttac

SEQ ID NO: 1650 - DNA, 18 bp, synthetic construct
  source 1..18: mol_type = other DNA
gaccccaaccccacctta

SEQ ID NO: 1651 - DNA, 18 bp, synthetic construct
  source 1..18: mol_type = other DNA
agaccccaaccccacctt

SEQ ID NO: 1652 - DNA, 18 bp, synthetic construct
  source 1..18: mol_type = other DNA
gagaccccaaccccacct

SEQ ID NO: 1653 - DNA, 18 bp, synthetic construct
  source 1..18: mol_type = other DNA
tgagaccccaaccccacc

SEQ ID NO: 1654 - DNA, 18 bp, synthetic construct
  source 1..18: mol_type = other DNA
ctgagaccccaaccccac

SEQ ID NO: 1655 - DNA, 18 bp, synthetic construct
  source 1..18: mol_type = other DNA
actgagaccccaacccca

SEQ ID NO: 1656 - DNA, 18 bp, synthetic construct
  source 1..18: mol_type = other DNA
tactgagaccccaacccc

SEQ ID NO: 1657 - DNA, 18 bp, synthetic construct
  source 1..18: mol_type = other DNA
atactgagaccccaaccc

SEQ ID NO: 1658 - DNA, 18 bp, synthetic construct
  source 1..18: mol_type = other DNA
aatactgagaccccaacc

SEQ ID NO: 1659 - DNA, 18 bp, synthetic construct
  source 1..18: mol_type = other DNA
aaatactgagaccccaac

SEQ ID NO: 1660 - DNA, 18 bp, synthetic construct
  source 1..18: mol_type = other DNA
caaatactgagaccccaa

SEQ ID NO: 1661 - DNA, 18 bp, synthetic construct
  source 1..18: mol_type = other DNA
tcaaatactgagacccca

SEQ ID NO: 1662 - DNA, 18 bp, synthetic construct
  source 1..18: mol_type = other DNA
ctcaaatactgagacccc

SEQ ID NO: 1663 - DNA, 18 bp, synthetic construct
  source 1..18: mol_type = other DNA
gctcaaatactgagaccc

SEQ ID NO: 1664 - DNA, 18 bp, synthetic construct
  source 1..18: mol_type = other DNA
tgctcaaatactgagacc

SEQ ID NO: 1665 - DNA, 18 bp, synthetic construct
  source 1..18: mol_type = other DNA
ctgctcaaatactgagac

SEQ ID NO: 1666 - DNA, 18 bp, synthetic construct
  source 1..18: mol_type = other DNA
tctgctcaaatactgaga

SEQ ID NO: 1667 - DNA, 18 bp, synthetic construct
  source 1..18: mol_type = other DNA
atctgctcaaatactgag

SEQ ID NO: 1668 - DNA, 18 bp, synthetic construct
  source 1..18: mol_type = other DNA
tatctgctcaaatactga

SEQ ID NO: 1669 - DNA, 18 bp, synthetic construct
  source 1..18: mol_type = other DNA
atatctgctcaaatactg

SEQ ID NO: 1670 - DNA, 18 bp, synthetic construct
  source 1..18: mol_type = other DNA
catatctgctcaaatact

SEQ ID NO: 1671 - DNA, 18 bp, synthetic construct
  source 1..18: mol_type = other DNA
tcatatctgctcaaatac

SEQ ID NO: 1672 - DNA, 18 bp, synthetic construct
  source 1..18: mol_type = other DNA
atcatatctgctcaaata

SEQ ID NO: 1673 - DNA, 18 bp, synthetic construct
  source 1..18: mol_type = other DNA
aatcatatctgctcaaat

SEQ ID NO: 1674 - DNA, 18 bp, synthetic construct
  source 1..18: mol_type = other DNA
taatcatatctgctcaaa

SEQ ID NO: 1675 - DNA, 18 bp, synthetic construct
  source 1..18: mol_type = other DNA
ctaatcatatctgctcaa

SEQ ID NO: 1676 - DNA, 18 bp, synthetic construct
  source 1..18: mol_type = other DNA
tctaatcatatctgctca

SEQ ID NO: 1677 - DNA, 18 bp, synthetic construct
  source 1..18: mol_type = other DNA
ctctaatcatatctgctc

SEQ ID NO: 1678 - DNA, 18 bp, synthetic construct
  source 1..18: mol_type = other DNA
cctctaatcatatctgct

SEQ ID NO: 1679 - DNA, 18 bp, synthetic construct
  source 1..18: mol_type = other DNA
tcctctaatcatatctgc

SEQ ID NO: 1680 - DNA, 18 bp, synthetic construct
  source 1..18: mol_type = other DNA
ttcctctaatcatatctg

SEQ ID NO: 1681 - DNA, 18 bp, synthetic construct
  source 1..18: mol_type = other DNA
cttcctctaatcatatct

SEQ ID NO: 1682 - DNA, 18 bp, synthetic construct
  source 1..18: mol_type = other DNA
gcttcctctaatcatatc

SEQ ID NO: 1683 - DNA, 18 bp, synthetic construct
  source 1..18: mol_type = other DNA
tgcttcctctaatcatat

SEQ ID NO: 1684 - DNA, 18 bp, synthetic construct
  source 1..18: mol_type = other DNA
ctgcttcctctaatcata

SEQ ID NO: 1685 - DNA, 18 bp, synthetic construct
  source 1..18: mol_type = other DNA
cctgcttcctctaatcat

SEQ ID NO: 1686 - DNA, 18 bp, synthetic construct
  source 1..18: mol_type = other DNA
tcctgcttcctctaatca

SEQ ID NO: 1687 - DNA, 18 bp, synthetic construct
  source 1..18: mol_type = other DNA
ctcctgcttcctctaatc

SEQ ID NO: 1688 - DNA, 18 bp, synthetic construct
  source 1..18: mol_type = other DNA
tctcctgcttcctctaat

SEQ ID NO: 1689 - DNA, 18 bp, synthetic construct
  source 1..18: mol_type = other DNA
atctcctgcttcctctaa

SEQ ID NO: 1690 - DNA, 18 bp, synthetic construct
  source 1..18: mol_type = other DNA
aatctcctgcttcctcta

SEQ ID NO: 1691 - DNA, 18 bp, synthetic construct
  source 1..18: mol_type = other DNA
aaatctcctgcttcctct

SEQ ID NO: 1692 - DNA, 18 bp, synthetic construct
  source 1..18: mol_type = other DNA
aaaatctcctgcttcctc

SEQ ID NO: 1693 - DNA, 18 bp, synthetic construct
  source 1..18: mol_type = other DNA
taaaatctcctgcttcct

SEQ ID NO: 1694 - DNA, 18 bp, synthetic construct
  source 1..18: mol_type = other DNA
ctaaaatctcctgcttcc

SEQ ID NO: 1695 - DNA, 18 bp, synthetic construct
  source 1..18: mol_type = other DNA
actaaaatctcctgcttc

SEQ ID NO: 1696 - DNA, 18 bp, synthetic construct
  source 1..18: mol_type = other DNA
tactaaaatctcctgctt

SEQ ID NO: 1697 - DNA, 18 bp, synthetic construct
  source 1..18: mol_type = other DNA
atactaaaatctcctgct

SEQ ID NO: 1698 - DNA, 18 bp, synthetic construct
  source 1..18: mol_type = other DNA
catactaaaatctcctgc

SEQ ID NO: 1699 - DNA, 18 bp, synthetic construct
  source 1..18: mol_type = other DNA
acatactaaaatctcctg

SEQ ID NO: 1700 - DNA, 18 bp, synthetic construct
  source 1..18: mol_type = other DNA
aacatactaaaatctcct

SEQ ID NO: 1701 - DNA, 18 bp, synthetic construct
  source 1..18: mol_type = other DNA
aaacatactaaaatctcc

SEQ ID NO: 1702 - DNA, 18 bp, synthetic construct
  source 1..18: mol_type = other DNA
aaaacatactaaaatctc

SEQ ID NO: 1703 - DNA, 18 bp, synthetic construct
  source 1..18: mol_type = other DNA
caaaacatactaaaatct

SEQ ID NO: 1704 - DNA, 18 bp, synthetic construct
  source 1..18: mol_type = other DNA
tcaaaacatactaaaatc

SEQ ID NO: 1705 - DNA, 18 bp, synthetic construct
  source 1..18: mol_type = other DNA
atcaaaacatactaaaat

SEQ ID NO: 1706 - DNA, 18 bp, synthetic construct
  source 1..18: mol_type = other DNA
catcaaaacatactaaaa

SEQ ID NO: 1707 - DNA, 18 bp, synthetic construct
  source 1..18: mol_type = other DNA
acatcaaaacatactaaa

SEQ ID NO: 1708 - DNA, 18 bp, synthetic construct
  source 1..18: mol_type = other DNA
tacatcaaaacatactaa

SEQ ID NO: 1709 - DNA, 18 bp, synthetic construct
  source 1..18: mol_type = other DNA
ttacatcaaaacatacta

SEQ ID NO: 1710 - DNA, 18 bp, synthetic construct
  source 1..18: mol_type = other DNA
tttacatcaaaacatact

SEQ ID NO: 1711 - DNA, 18 bp, synthetic construct
  source 1..18: mol_type = other DNA
ctttacatcaaaacatac

SEQ ID NO: 1712 - DNA, 18 bp, synthetic construct
  source 1..18: mol_type = other DNA
gctttacatcaaaacata

SEQ ID NO: 1713 - DNA, 18 bp, synthetic construct
  source 1..18: mol_type = other DNA
ggctttacatcaaaacat

SEQ ID NO: 1714 - DNA, 18 bp, synthetic construct
  source 1..18: mol_type = other DNA
tggctttacatcaaaaca

SEQ ID NO: 1715 - DNA, 18 bp, synthetic construct
  source 1..18: mol_type = other DNA
ttggctttacatcaaaac

SEQ ID NO: 1716 - DNA, 18 bp, synthetic construct
  source 1..18: mol_type = other DNA
gttggctttacatcaaaa

SEQ ID NO: 1717 - DNA, 18 bp, synthetic construct
  source 1..18: mol_type = other DNA
tgttggctttacatcaaa

SEQ ID NO: 1718 - DNA, 18 bp, synthetic construct
  source 1..18: mol_type = other DNA
atgttggctttacatcaa

SEQ ID NO: 1719 - DNA, 18 bp, synthetic construct
  source 1..18: mol_type = other DNA
aatgttggctttacatca

SEQ ID NO: 1720 - DNA, 18 bp, synthetic construct
  source 1..18: mol_type = other DNA
caatgttggctttacatc

SEQ ID NO: 1721 - DNA, 18 bp, synthetic construct
  source 1..18: mol_type = other DNA
acaatgttggctttacat

SEQ ID NO: 1722 - DNA, 18 bp, synthetic construct
  source 1..18: mol_type = other DNA
tacaatgttggctttaca

SEQ ID NO: 1723 - DNA, 18 bp, synthetic construct
  source 1..18: mol_type = other DNA
atacaatgttggctttac

SEQ ID NO: 1724 - DNA, 18 bp, synthetic construct
  source 1..18: mol_type = other DNA
gatacaatgttggcttta

SEQ ID NO: 1725 - DNA, 18 bp, synthetic construct
  source 1..18: mol_type = other DNA
agatacaatgttggcttt

SEQ ID NO: 1726 - DNA, 18 bp, synthetic construct
  source 1..18: mol_type = other DNA
tagatacaatgttggctt

SEQ ID NO: 1727 - DNA, 18 bp, synthetic construct
  source 1..18: mol_type = other DNA
atagatacaatgttggct

SEQ ID NO: 1728 - DNA, 18 bp, synthetic construct
  source 1..18: mol_type = other DNA
tatagatacaatgttggc

SEQ ID NO: 1729 - DNA, 18 bp, synthetic construct
  source 1..18: mol_type = other DNA
atatagatacaatgttgg

SEQ ID NO: 1730 - DNA, 18 bp, synthetic construct
  source 1..18: mol_type = other DNA
tatatagatacaatgttg

SEQ ID NO: 1731 - DNA, 18 bp, synthetic construct
  source 1..18: mol_type = other DNA
gtatatagatacaatgtt

SEQ ID NO: 1732 - DNA, 18 bp, synthetic construct
  source 1..18: mol_type = other DNA
tgtatatagatacaatgt

SEQ ID NO: 1733 - DNA, 18 bp, synthetic construct
  source 1..18: mol_type = other DNA
ttgtatatagatacaatg

SEQ ID NO: 1734 - DNA, 18 bp, synthetic construct
  source 1..18: mol_type = other DNA
attgtatatagatacaat

SEQ ID NO: 1735 - DNA, 18 bp, synthetic construct
  source 1..18: mol_type = other DNA
tattgtatatagatacaa

SEQ ID NO: 1736 - DNA, 18 bp, synthetic construct
  source 1..18: mol_type = other DNA
ttattgtatatagataca

SEQ ID NO: 1737 - DNA, 18 bp, synthetic construct
  source 1..18: mol_type = other DNA
tttattgtatatagatac

SEQ ID NO: 1738 - DNA, 18 bp, synthetic construct
  source 1..18: mol_type = other DNA
gtttattgtatatagata

SEQ ID NO: 1739 - DNA, 18 bp, synthetic construct
  source 1..18: mol_type = other DNA
agtttattgtatatagat

SEQ ID NO: 1740 - DNA, 18 bp, synthetic construct
  source 1..18: mol_type = other DNA
tagtttattgtatataga

SEQ ID NO: 1741 - DNA, 18 bp, synthetic construct
  source 1..18: mol_type = other DNA
gtagtttattgtatatag

SEQ ID NO: 1742 - DNA, 18 bp, synthetic construct
  source 1..18: mol_type = other DNA
ggtagtttattgtatata

SEQ ID NO: 1743 - DNA, 18 bp, synthetic construct
  source 1..18: mol_type = other DNA
gggtagtttattgtatat

SEQ ID NO: 1744 - DNA, 18 bp, synthetic construct
  source 1..18: mol_type = other DNA
ggggtagtttattgtata

SEQ ID NO: 1745 - DNA, 18 bp, synthetic construct
  source 1..18: mol_type = other DNA
gggggtagtttattgtat

SEQ ID NO: 1746 - DNA, 18 bp, synthetic construct
  source 1..18: mol_type = other DNA
agggggtagtttattgta

SEQ ID NO: 1747 - DNA, 18 bp, synthetic construct
  source 1..18: mol_type = other DNA
aagggggtagtttattgt

SEQ ID NO: 1748 - DNA, 18 bp, synthetic construct
  source 1..18: mol_type = other DNA
aaagggggtagtttattg

SEQ ID NO: 1749 - RNA, 11 nt, synthetic construct
  source 1..11: mol_type = other RNA
aatttttggag

SEQ ID NO: 1750 - RNA, 11 nt, synthetic construct
  source 1..11: mol_type = other RNA
aatttgtctag

SEQ ID NO: 1751 - DNA, 341 bp, Mus sp.
  source 1..341: mol_type = genomic DNA
cccacatcgcctgccactacttaagtccgattcacttcggctttagctccaagcctttaatctcgcgaagctctttttttttttttaacaacataggagctgtgattggctgttttcagccaatcagcactgactcatttgcatagcctttacaagcggtcacaaactcaagaaacgagcggttttaatagtcttttagaatattgtttatcgaaccgaataaggaactgtgctttgtgattcacatatcagtggaggggtgtggaaatggcaccttgatctcaccctcatcgaaagtggagttgatgtccttccctggctcgctacagacgcacttccgc

SEQ ID NO: 1752 - DNA, 20 bp, synthetic construct
  source 1..20: mol_type = other DNA
aagtgttacagctcttttag

SEQ ID NO: 1753 - DNA, 62 bp, Mus sp.
  source 1..62: mol_type = genomic DNA
aagtgttacagctcttttagaatttgtctagcaggttttctgacttcggtcggaaaacccct

SEQ ID NO: 1754 - DNA, 62 bp, synthetic construct
  source 1..62: mol_type = other DNA
aagtgttacagctcttttagaatttttggagcaggttttctgacttcggtcggaaaacccct

SEQ ID NO: 1755 - DNA, 11 bp, synthetic construct
  source 1..11: mol_type = other DNA
aatttttggag

SEQ ID NO: 1756 - DNA, 168 bp, synthetic construct
  source 1..168: mol_type = other DNA
cccaatttcactggtctacaatgaaagcaaaacagttctcttccccgctccccggtgtgtgagaggggctttgatccttctctggtttcctaggaaacgcgtatgtgctagagccacgctctgagacttccgcctcgtgcggtcccgcttcctttctgcctcctctgg

SEQ ID NO: 1757 - DNA, 571 bp, Mus sp.
  source 1..571: mol_type = genomic DNA
cccacatcgcctgccactacttaagtccgattcacttcggctttagctccaagcctttaatctcgcgaagctctttttttttttttaacaacataggagctgtgattggctgttttcagccaatcagcactgactcatttgcatagcctttacaagcggtcacaaactcaagaaacgagcggttttaatagtcttttagaatattgtttatcgaaccgaataaggaactgtgctttgtgattcacatatcagtggaggggtgtggaaatggcaccttgatctcaccctcatcgaaagtggagttgatgtccttccctggctcgctacagacgcacttccgcaagtgttacagctcttttagaatttgtctagcaggttttctgacttcggtcggaaaacccctcccaatttcactggtctacaatgaaagcaaaacagttctcttccccgctccccggtgtgtgagaggggctttgatccttctctggtttcctaggaaacgcgtatgtgctagagccacgctctgagacttccgcctcgtgcggtcccgcttcctttctgcctcctctgg

SEQ ID NO: 1758 - DNA, 571 bp, synthetic construct
  source 1..571: mol_type = other DNA
cccacatcgcctgccactacttaagtccgattcacttcggctttagctccaagcctttaatctcgcgaagctctttttttttttttaacaacataggagctgtgattggctgttttcagccaatcagcactgactcatttgcatagcctttacaagcggtcacaaactcaagaaacgagcggttttaatagtcttttagaatattgtttatcgaaccgaataaggaactgtgctttgtgattcacatatcagtggaggggtgtggaaatggcaccttgatctcaccctcatcgaaagtggagttgatgtccttccctggctcgctacagacgcacttccgcaagtgttacagctcttttagaatttttggagcaggttttctgacttcggtcggaaaacccctcccaatttcactggtctacaatgaaagcaaaacagttctcttccccgctccccggtgtgtgagaggggctttgatccttctctggtttcctaggaaacgcgtatgtgctagagccacgctctgagacttccgcctcgtgcggtcccgcttcctttctgcctcctctgg

SEQ ID NO: 1759 - DNA, 210 bp, synthetic construct
  source 1..210: mol_type = other DNA
aatttttggagcaggttttctgacttcggtcggaaaacccctcccaatttcactggtctacaatgaaagcaaaacagttctcttccccgctccccggtgtgtgagaggggctttgatccttctctggtttcctaggaaacgcgtatgtgctagagccacgctctgagacttccgcctcgtgcggtcccgcttcctttctgcctcctctgg

SEQ ID NO: 1760 - DNA, 570 bp, synthetic construct
  source 1..570: mol_type = other DNA
cccacatcgcctgccactacttaagtccgattcacttcggctttagctccaagcctttaatctcgcgaagctctttttttttttttaacaacataggagctgtgattggctgttttcagccaatcagcactgactcatttgcatagcctttacaagcggtcacaaactcaagaaacgagcggttttaatagtcttttagaatattgtttatcgaaccgaataaggaactgtgctttgtgattcacatatcagtggaggggtgtggaaatggcaccttgatctcaccctcatcgaaagtggagttgatgtccttccctggctcgctacagacgcacttccgcaacaaaggctacaaaaagtaatttttggagcaggttttctgacttcggtcggaaaacccctcccaatttcactggtctacaatgaaagcaaaacagttctcttccccgctccccggtgtgtgagaggggctttgatccttctctggtttcctaggaaacgcgtatgtgctagagccacgctctgagacttccgcctcgtgcggtcccgcttcctttctgcctcctctgg

SEQ ID NO: 1761 - DNA, 432 bp, Homo sapiens
  source 1..432: mol_type = genomic DNA
gctccatctggccaccgaaaggttgctccttaacacaggctaaggaccagcttctttgggagagaacagacgcaggggcgggagggaaaaagggagaggcagacgtcacttccccttggcggctctggcagcagattggtcggttgagtggcagaaaggcagacggggactgggcaaggcactgtcggtgacatcacggacagggcgacttctatgtagatgaggcagcgcagaggctgctgcttcgccacttgctgcttcaccacgaaggagttcccgtgccctgggagcgggttcaggaccgctgatcggaagtgagaatcccagctgtgtgtcagggctggaaagggctcgggagtgcgcggggcaagtgaccgtgtgtgtaaagagtgaggcgtatgaggctgtgtcggggcagaggcccaagatctc

SEQ ID NO: 1762 - DNA, 164 bp, Homo sapiens
  source 1..164: mol_type = genomic DNA
atacttacctggcaggggagataccatgatcacgaaggtggttttcccagggcgaggcttatccattgcactccggatgtgctgacccctgcgatttccccaaatgtgggaaactcgactgcataatttgtggtagtgggggactgcgttcgcgctttcccctg

SEQ ID NO: 1763 - DNA, 210 bp, Homo sapiens
  source 1..210: mol_type = genomic DNA
actttctggagtttcaaaagtagactgtacgctaagggtcatatctttttttgttttggtttgtgtcttggttggcgtcttaaatgttaatcctacagtggagggctgcggaataggaagtaacatgtcgcctgcacgccataggagaaaaagcgagcatcagccgtatcggctttgtaacacaaattagctatcgtgaagtccgctcag

SEQ ID NO: 1764 - DNA, 806 bp, Homo sapiens
  source 1..806: mol_type = genomic DNA
gctccatctggccaccgaaaggttgctccttaacacaggctaaggaccagcttctttgggagagaacagacgcaggggcgggagggaaaaagggagaggcagacgtcacttccccttggcggctctggcagcagattggtcggttgagtggcagaaaggcagacggggactgggcaaggcactgtcggtgacatcacggacagggcgacttctatgtagatgaggcagcgcagaggctgctgcttcgccacttgctgcttcaccacgaaggagttcccgtgccctgggagcgggttcaggaccgctgatcggaagtgagaatcccagctgtgtgtcagggctggaaagggctcgggagtgcgcggggcaagtgaccgtgtgtgtaaagagtgaggcgtatgaggctgtgtcggggcagaggcccaagatctcatacttacctggcaggggagataccatgatcacgaaggtggttttcccagggcgaggcttatccattgcactccggatgtgctgacccctgcgatttccccaaatgtgggaaactcgactgcataatttgtggtagtgggggactgcgttcgcgctttcccctgactttctggagtttcaaaagtagactgtacgctaagggtcatatctttttttgttttggtttgtgtcttggttggcgtcttaaatgttaatcctacagtggagggctgcggaataggaagtaacatgtcgcctgcacgccataggagaaaaagcgagcatcagccgtatcggctttgtaacacaaattagctatcgtgaagtccgctcag

SEQ ID NO: 1765 - DNA, 434 bp, synthetic construct
  source 1..434: mol_type = other DNA
gctccatctggccaccgaaaggttgctccttaacacaggctaaggaccagcttctttgggagagaacagacgcaggggcgggagggaaaaagggagaggcagacgtcacttccccttggcggctctggcagcagattggtcggttgagtggcagaaaggcagacggggactgggcaaggcactgtcggtgacatcacggacagggcgacttctatgtagatgaggcagcgcagaggctgctgcttcgccacttgctgcttcaccacgaaggagttcccgtgccctgggagcgggttcaggaccgctgatcggaagtgagaatcccagctgtgtgtcagggctggaaagggctcgggagtgcgcggggcaagtgaccgtgtgtgtaaagagtgaggcgtatgaggctgtgtcggggcagaggcccaagatctcat

SEQ ID NO: 1766 - DNA, 363 bp, synthetic construct
  source 1..363: mol_type = other DNA
gcaggggagataccatgatcacgaaggtggttttcccagggcgaggcttatccattgcactccggatgtgctgacccctgcgatttccccaaatgtgggaaactcgactgcataatttgtggtagtgggggactgcgttcgcgctttcccctgactttctggagtttcaaaagtagactgtacgctaagggtcatatctttttttgttttggtttgtgtcttggttggcgtcttaaatgttaatcctacagtggagggctgcggaataggaagtaacatgtcgcctgcacgccataggagaaaaagcgagcatcagccgtatcggctttgtaacacaaattagctatcgtgaagtccgctcag

SEQ ID NO: 1767 - DNA, 815 bp, synthetic construct
  source 1..815: mol_type = other DNA
gctccatctggccaccgaaaggttgctccttaacacaggctaaggaccagcttctttgggagagaacagacgcaggggcgggagggaaaaagggagaggcagacgtcacttccccttggcggctctggcagcagattggtcggttgagtggcagaaaggcagacggggactgggcaaggcactgtcggtgacatcacggacagggcgacttctatgtagatgaggcagcgcagaggctgctgcttcgccacttgctgcttcaccacgaaggagttcccgtgccctgggagcgggttcaggaccgctgatcggaagtgagaatcccagctgtgtgtcagggctggaaagggctcgggagtgcgcggggcaagtgaccgtgtgtgtaaagagtgaggcgtatgaggctgtgtcggggcagaggcccaagatctcatacaaaggctacaaaaagtgcaggggagataccatgatcacgaaggtggttttcccagggcgaggcttatccattgcactccggatgtgctgacccctgcgatttccccaaatgtgggaaactcgactgcataatttgtggtagtgggggactgcgttcgcgctttcccctgactttctggagtttcaaaagtagactgtacgctaagggtcatatctttttttgttttggtttgtgtcttggttggcgtcttaaatgttaatcctacagtggagggctgcggaataggaagtaacatgtcgcctgcacgccataggagaaaaagcgagcatcagccgtatcggctttgtaacacaaattagctatcgtgaagtccgctcag

SEQ ID NO: 1768 - DNA, 18 bp, synthetic construct
  source 1..18: mol_type = other DNA
  modified_base 1..18: mod_base = OTHER; note = phosphorodiamidate morpholino modified nucleotide
ttcctctaatcatatctg

SEQ ID NO: 1769 - DNA, 20 bp, synthetic construct
  source 1..20: mol_type = other DNA
  modified_base 1..20: mod_base = OTHER; note = phosphorodiamidate morpholino modified nucleotide
ttcctctaatcatatctgct

SEQ ID NO: 1770 - DNA, 20 bp, synthetic construct
  source 1..20: mol_type = other DNA
  modified_base 1..20: mod_base = OTHER; note = phosphorodiamidate morpholino modified nucleotide
gcttcctctaatcatatctg

SEQ ID NO: 1771 - DNA, 18 bp, synthetic construct
  source 1..18: mol_type = other DNA
  modified_base 1..18: mod_base = OTHER; note = 2'-O-methoxyethyl modified nucleotide with phosphorothioate backbone
ttcctctaatcatatctg

SEQ ID NO: 1772 - DNA, 19 bp, synthetic construct
  source 1..19: mol_type = other DNA
  modified_base 1..19: mod_base = OTHER; note = 2'-O-methoxyethyl modified nucleotide with phosphorothioate backbone
ttcctctaatcatatctgc

SEQ ID NO: 1773 - DNA, 20 bp, synthetic construct
  source 1..20: mol_type = other DNA
  modified_base 1..20: mod_base = OTHER; note = 2'-O-methoxyethyl modified nucleotide with phosphorothioate backbone
ttcctctaatcatatctgct

SEQ ID NO: 1774 - DNA, 20 bp, synthetic construct
  source 1..20: mol_type = other DNA
  modified_base 1..20: mod_base = OTHER; note = 2'-O-methoxyethyl modified nucleotide with phosphorothioate backbone
gcttcctctaatcatatctg

SEQ ID NO: 1775 - DNA, 101 bp, synthetic construct
  source 1..101: mol_type = other DNA
cactttttgtagcctttgtcagaatttcattccttttaaagtgtgttattctttttgacacttaaattacaacaattttggcctgtggactctatttttat

SEQ ID NO: 1776 - DNA, 77 bp, synthetic construct
  source 1..77: mol_type = other DNA
tttttgttcttaggtaagttcccgctgtgaagaggaaagccttctagcccgaggtcgatctagtgctcagaacaagc

SEQ ID NO: 1777 - DNA, 98 bp, synthetic construct
  source 1..98: mol_type = other DNA
agtgctcagaacaagcaggtggacgagaattctttgatttcaaccaaagaagagcctccagttcttgaaagggaggctccgtttttggagggcccctt

SEQ ID NO: 1778 - DNA, 97 bp, synthetic construct
  source 1..97: mol_type = other DNA
gtttttggagggccccttggctcagtcagaacttggaggtggacatgctgagttgccgcagctgaccttgtctgtgcctgtggctccggaagtctct

SEQ ID NO: 1779 - DNA, 94 bp, synthetic construct
  source 1..94: mol_type = other DNA
tgtggctccggaagtctctccacggcctgcccttgagtctgaggaattgctagttaaaacgccaggtaaggtggggttggggtctcagtatttg

SEQ ID NO: 1780 - DNA, 105 bp, synthetic construct
  source 1..105: mol_type = other DNA
ggggtctcagtatttgagcagatatgattagaggaagcaggagattttagtatgttttgatgtaaagccaacattgtatctatatacaataaactaccccctttt

1. A method of modulating expression of a target protein in a cell comprising a pre-mRNA that is transcribed from a target gene and that encodes the target protein, the pre-mRNA comprising an alternatively-spliced coding exon (ASCE), wherein an alternative processed mRNA that is produced by splicing out of the ASCE during processing of the pre-mRNA undergoes non-sense mediated RNA decay, the method comprising contacting a therapeutic agent or a vector encoding the therapeutic agent to the cell, wherein the therapeutic agent promotes inclusion of the ASCE during the processing of the pre-mRNA, thereby increasing a level of a processed mRNA that is processed from the pre-mRNA and that comprises the ASCE.

2. A method of treating or reducing the likelihood of developing a disease or condition in a subject in need thereof by modulating expression of a target protein in a cell of the subject, the method comprising: contacting the cell of the subject with a therapeutic agent or a vector encoding the therapeutic agent, wherein the cell comprises a pre-mRNA that is transcribed from a target gene and that encodes the target protein, the pre-mRNA comprising an alternatively-spliced coding exon (ASCE), wherein an alternative processed mRNA that is produced by splicing out of the ASCE during processing of the pre-mRNA undergoes non-sense mediated RNA decay, wherein the therapeutic agent promotes inclusion of the ASCE during the processing of the pre-mRNA, thereby increasing a level of a processed mRNA that is processed from the pre-mRNA and that comprises the ASCE.

3. The method of claim 1, wherein the expression of the target protein is increased in the cell.

4. The method of claim 1, wherein the target gene is selected from the group consisting of: PKD1, ABCA4, FUS, CEL, and NSD1.

5. (canceled)

6. The method of claim 1, wherein the therapeutic agent
(a) binds to a targeted portion of the pre-mRNA encoding the target protein;
(b) modulates binding of a factor involved in splicing of the ASCE; or
(c) a combination of (a) and (b).

7. The method of claim 6, wherein the therapeutic agent interferes with binding of the factor involved in splicing of the ASCE to a region of the targeted portion.

8. The method of claim 6, wherein the targeted portion is proximal to the ASCE.

9-16. (canceled)

17. The method of claim 6, wherein the targeted portion is located in an intronic region between the ASCE and a canonical exonic region upstream of the ASCE of the pre-mRNA encoding the target protein.

18. The method of claim 6, wherein the targeted portion is located in an intronic region between the ASCE and a canonical exonic region downstream of the ASCE of the pre-mRNA encoding the target protein.

19. The method of claim 6, wherein the targeted portion comprises at least a portion of the ASCE.

20. The method of claim 6, wherein the targeted portion at least a portion of an intronic region upstream or downstream of the ASCE.

21. The method of claim 6, wherein the targeted portion does not comprise a 5′ exon-intron junction of the ASCE or a 3′ exon-intron junction of the ASCE.

22. The method of claim 6, wherein the targeted portion is within the ASCE.

23. The method of claim 6, wherein the targeted portion comprises 5 or more consecutive nucleotides of the ASCE.

24-26. (canceled)

27. The method of claim 1, wherein the targeted portion of the pre-mRNA is within the ASCE selected from the group consisting of: GRCh38/hg38: chr16 2092954 2093093; GRCh38/hg38: chr1 94111438 94111579; GRCh38/hg38: chr16 31186802 31186836; GRCh38/hg38: chr9 133066530 133066660; and GRCh38/hg38: chr5 177238237 177238507.

28. The method of claim 1, wherein the targeted portion of the pre-mRNA is upstream or downstream of the ASCE selected from the group consisting of: GRCh38/hg38: chr16 2092954 2093093; GRCh38/hg38: chr1 94111438 94111579; GRCh38/hg38: chr16 31186802 31186836; GRCh38/hg38: chr9 133066530 133066660; and GRCh38/hg38: chr5 177238237 177238507.

29-34. (canceled)

35. The method of claim 1, wherein the target protein is NSD1, and wherein the method causes a modification of a histone protein in the cell.

36. The method of claim 35, wherein the histone protein is Histone H3.

37-66. (canceled)

67. The method of claim 1, wherein the alternative processed mRNA that is produced by splicing out of the ASCE during processing of the pre-mRNA comprises a premature termination codon (PTC).

68. The method of claim 1, wherein the agent is an antisense oligomer (ASO).

69-164. (canceled)
